(19) United States
(12) Patent Application Publication
(10) Pub. No.: US 2018/0369275 A1
(43) Pub. Date: Dec. 27, 2018

(54) ANTISENSE OLIGOMERS FOR TREATMENT OF AUTOSOMAL DOMINANT MENTAL RETARDATION-5 AND DRAVET SYNDROME

(71) Applicants: Cold Spring Harbor Laboratory, Cold Spring Harbor, NY (US); Stoke Therapeutics, Inc., Bedford, MA (US)

(72) Inventors: Isabel ARNAREZ, Cambridge, MA (US); Huw M. NASH, Lexington, MA (US)

(21) Appl. No.: 16/062,286

(22) PCT Filed: Dec. 14, 2016
(86) PCT No.: PCT/US16/66708

§ 371 Date: Jun. 14, 2018

Related U.S. Application Data
(60) Provisional application No. 62/267,251, filed on Dec. 14, 2015.

(51) Int. Cl. A61K 31/7125; A61K 31/712; C12N 15/113; C12Q 1/6883; A61P 43/00

(52) U.S. Cl. CPC A61K 31/7125; A61K 31/712; A61K 2300/00; C12Q 1/6883; A61P 43/00; C12N 15/1138

(57) ABSTRACT

Provided herein are methods and compositions for treating a subject in need thereof, such as a subject with deficient SYNGAP1 protein or SCN1A protein expression or a subject having AD mental retardation 5 or Dravet syndrome.

### CROSS-REFERENCE

[0001] This application claims the benefit of U.S. Provisional Application No. 62/267,251, filed Dec. 14, 2015, which application is incorporated herein by reference.

### REFERENCE TO A SEQUENCE LISTING

[0002] The instant application contains a Sequence Listing which has been filed electronically in ASCII format and is hereby incorporated by reference in its entirety. Said ASCII copy, created on Dec. 12, 2016, is named 47991_708_601_SL.txt and is 1,460,063 bytes in size.

### BACKGROUND OF THE INVENTION

[0003] Mental retardation is the most prevalent handicap of children affecting 1 to 3% of the population. Autosomal Dominant Mental Retardation-5 (MRD5) is a prevalent nonsyndromic form of the disorder characterized by the lack of associated morphologic, radiologic, and metabolic features. A case study identified de novo genetic lesions in the SYNGAP1 gene that result in the production of truncated proteins in approximately 3% of patients with unexplained nonsyndromic mental retardation. SYNGAP1 is a GTPase-activating enzyme that is selectively expressed in the brain and required for normal development (Hamden, et al., 2009, NEJM 360: 599-605).

[0004] Dravet Syndrome (DS), also known as severe myoclonic epilepsy of infancy or SMEI, was first described by Dravet in 1978. It is a childhood epilepsy characterized by an onset of seizures during the first year of life that do not remit. Mutations in the SCN1A gene, which is part of the SCN1A-SCN2A-SCN3A gene cluster that encodes alpha-pore forming subunits of the neuronal voltage gated sodium channel, are associated with development of the disease (Miller, et al., 1993-2015, GeneReviews, Eds. Pagon R A, et al. Seattle (Wash.): University of Washington, Seattle, Bookshelf ID: NBK1318, and Mulley, et al., 2005, Hum. Mutat. 25: 535-542).

### SUMMARY OF THE INVENTION

[0005] Disclosed herein, in some embodiments, are methods of treating a Autosomal Dominant Mental Retardation 5 (MRD5) or Dravet Syndrome (DS) in a subject in need thereof, by increasing the expression of a target protein or functional RNA by cells of the subject, wherein the cells have a retained-intron-containing pre-mRNA (RIC pre-mRNA), the RIC pre-mRNA comprising a retained intron, an exon flanking the 5′ splice site, an exon flanking the 3′ splice site, and wherein the RIC pre-mRNA encodes the target protein or functional RNA, the method comprising contacting the cells of the subject with an antisense oligomer (ASO) complementary to a targeted portion of the RIC pre-mRNA encoding the target protein or functional RNA, whereby the retained intron is constitutively spliced from the RIC pre-mRNA encoding the target protein or functional RNA, thereby increasing the level of mRNA encoding the target protein or functional RNA, and increasing the expression of the target protein or functional RNA in the cells of the subject.

[0006] Disclosed herein, in some embodiments, are methods of increasing expression of a target protein, wherein the target protein is SYNGAP1 or SCN1A, by cells having a retained-intron-containing pre-mRNA (RIC pre-mRNA), the RIC pre-mRNA comprising a retained intron, an exon flanking the 5′ splice site of the retained intron, an exon flanking the 3′ splice site of the retained intron, and wherein the RIC pre-mRNA encodes SYNGAP1 or SCN1A protein, the method comprising contacting the cells with an antisense oligomer (ASO) complementary to a targeted portion of the RIC pre-mRNA encoding SYNGAP1 or SCN1A protein, whereby the retained intron is constitutively spliced from the RIC pre-mRNA encoding SYNGAP1 or SCN1A protein, thereby increasing the level of mRNA encoding SYNGAP1 or SCN1A protein, and increasing the expression of SYNGAP1 or SCN1A protein in the cells.

[0007] In some embodiments of any of the aforementioned methods, the method is a method of treating MRD5 and the target protein is SYNGAP1, or the method is a method of treating DS and the target protein is SCN1A. In some embodiments, the target protein or the functional RNA is a compensating protein or a compensating functional RNA that functionally augments or replaces a target protein or functional RNA that is deficient in amount or activity in the subject. In some embodiments, the cells are in or from a subject having a condition caused by a deficient amount or activity of SYNGAP1 or SCN1A protein. In some embodiments, the deficient amount of the target protein is caused by haploinsufficiency of the target protein, wherein the subject has a first allele encoding a functional target protein, and a second allele from which the target protein is not produced, or a second allele encoding a nonfunctional target protein, and wherein the antisense oligomer binds to a targeted portion of a RIC pre-mRNA transcribed from the first allele. In some embodiments, the subject has a condition caused by a disorder resulting from a deficiency in the amount or function of the target protein, wherein the subject has (a) a first mutant allele from which (i) the target protein is produced at a reduced level compared to production from a wild-type allele, (ii) the target protein is produced in a form having reduced function compared to an equivalent wild-type protein, or (iii) the target protein is not produced, and (b) a second mutant allele from which (i) the target protein is produced at a reduced level compared to production from a wild-type allele, (ii) the target protein is produced in a form having reduced function compared to an equivalent wild-type protein, or (iii) the target protein is not produced, and wherein when the subject has a first mutant allele (a)(iii), the second mutant allele is (b)(i) or (b)(ii), and wherein when the subject has a second mutant allele (b)(iii), the first mutant allele is (a)(i) or (a)(ii), and wherein the RIC pre-mRNA is transcribed from either the first mutant allele that is (a)(i) or (a)(ii), and/or the second allele that is (b)(i) or (b)(ii). In some embodiments, the target protein is produced in a form having reduced function compared to the equivalent wild-type protein. In some embodiments, the target protein is produced in a form that is fully-functional compared to the equivalent wild-type protein.

[0008] In some embodiments of any of the aforementioned methods, the targeted portion of the RIC pre-mRNA is in the retained intron within the region +6 relative to the 5′ splice site of the retained intron to −16 relative to the 3′ splice site of the retained intron. In some embodiments, the targeted portion of the RIC pre-mRNA is in the retained intron within: (a) the region +6 to +499 relative to the 5′ splice site of the retained intron; or (b) the region −16 to −496 relative to the 3′ splice site of the retained intron. In some embodiments, the targeted portion of the RIC pre-mRNA is within: (a) the region +2e to −4e in the exon flanking the 5′ splice site of the retained intron; or (b) the region +2e to −4e in the exon flanking the 3′ splice site of the retained intron. In some embodiments, the targeted portion of the RIC pre-mRNA is within: (a) the region −4e to −1,054e relative to the 5′ splice site of the retained intron; (b) the region +6 to +499 relative to the 5′ splice site of the retained intron; (c) the region −16 to −496 relative to the 3′ splice site of the retained intron; or (d) the region +2e to +1,912e relative to the 3′ splice site of the retained intron.

[0009] In some embodiments of any of the aforementioned methods, the target protein is SCN1A. In some embodiments, the RIC pre-mRNA comprises a sequence with at least about 80%, 85%, 90%, 95%, 97%, or 100% sequence identity to any one of SEQ ID NOs: 4-7. In some embodiments, the RIC pre-mRNA is encoded by a genetic sequence with at least about 80%, 85%, 90%, 95%, 97%, or 100% sequence identity to SEQ ID NO: 1. In some embodiments, the targeted portion of the RIC pre-mRNA comprises a sequence with at least 80%, 85%, 90%, 95%, 97%, or 100% sequence identity to a region comprising at least 8 contiguous nucleic acids of SEQ ID NO: 2593. In some embodiments, the ASO comprises a sequence that is at least about 80%, 85%, 90%, 95%, 97%, or 100% complimentary to any one of SEQ ID NOs: 10-1037. In some embodiments, the targeted portion of the RIC pre-mRNA is within the region −264e to +496 relative to the 5′ splice site of the retained intron 21 or within the region −496 to +37e relative to the 3′ splice site of the retained intron 21. In some embodiments, the ASO comprises a sequence that is at least about 80%, 85%, 90%, 95%, 97%, or 100% complimentary to any one of SEQ ID NOs: 10-266 or 524-1037. In some embodiments, the targeted portion of the RIC pre-mRNA is within the region −264e to −4e relative to the 5′ splice site of the retained intron 21. In some embodiments, the ASO comprises a sequence that is at least about 80%, 85%, 90%, 95%, 97%, or 100% complimentary to any one of SEQ ID NOs: 10-62, 524-576, or 781-833. In some embodiments, the targeted portion of the RIC pre-mRNA is in retained intron 21 within the region +6 to +496 relative to the 5′ splice site of the retained intron 21. In some embodiments, the ASO comprises a sequence that is at least about 80%, 85%, 90%, 95%, 97%, or 100% complimentary to any one of SEQ ID NOs: 63-162, 577-675, or 834-932. In some embodiments, the targeted portion of the RIC pre-mRNA is in retained intron 21 within the region −16 to −496 relative to the 3′ splice site of the retained intron 21. In some embodiments, the ASO comprises a sequence that is at least about 80%, 85%, 90%, 95%, 97%, or 100% complimentary to any one of SEQ ID NOs: 163-258, 676-772, or 933-1029. In some embodiments, the targeted portion of the RIC pre-mRNA is within the region +2e to +37e relative to the 3′ splice site of the retained intron 21. In some embodiments, the ASO comprises a sequence that is at least about 80%, 85%, 90%, 95%, 97%, or 100% complimentary to any one of SEQ ID NOs: 259-266, 773-780, or 1030-1037.

[0010] In some embodiments of any of the aforementioned methods, the target protein is SCN1A. In some embodiments, the targeted portion of the RIC pre-mRNA is within the region −264e to +496 relative to the 5′ splice site of the retained intron 23 or within the region −496 to +37e relative to the 3′ splice site of the retained intron 23. In some embodiments, the ASO comprises a sequence that is at least about 80%, 85%, 90%, 95%, 97%, or 100% complimentary to any one of SEQ ID NOs: 267-523. In some embodiments, the targeted portion of the RIC pre-mRNA is within the region −264e to −4e relative to the 5′ splice site of the retained intron 23. In some embodiments, the ASO comprises a sequence that is at least about 80%, 85%, 90%, 95%, 97%, or 100% complimentary to any one of SEQ ID NOs: 267-319. In some embodiments, the targeted portion of the RIC pre-mRNA is in retained intron 23 within the region +6 to +496 relative to the 5′ splice site of the retained intron 23. In some embodiments, the ASO comprises a sequence that is at least about 80%, 85%, 90%, 95%, 97%, or 100% complimentary to any one of SEQ ID NOs: 320-418. In some embodiments, the targeted portion of the RIC pre-mRNA is in retained intron 23 within the region −16 to −496 relative to the 3′ splice site of the retained intron 23. In some embodiments, the ASO comprises a sequence that is at least about 80%, 85%, 90%, 95%, 97%, or 100% complimentary to any one of SEQ ID NOs: 419-515. In some embodiments, the targeted portion of the RIC pre-mRNA is within the region +2e to +37e relative to the 3′ splice site of the retained intron 23. In some embodiments, the ASO comprises a sequence that is at least about 80%, 85%, 90%, 95%, 97%, or 100% complimentary to any one of SEQ ID NOs: 516-523.

[0011] In some embodiments of any of the aforementioned methods, the target protein is SYNGAP1. In some embodiments, the RIC pre-mRNA comprises a sequence with at least about 80%, 85%, 90%, 95%, 97%, or 100% sequence identity to any one of SEQ ID NOs: 8 or 9. In some embodiments, the RIC pre-mRNA is encoded by a genetic sequence with at least about 80%, 85%, 90%, 95%, 97%, or 100% sequence identity to SEQ ID NO: 2 or 3. In some embodiments, the targeted portion of the RIC pre-mRNA comprises a sequence with at least 80%, 85%, 90%, 95%, 97%, or 100% sequence identity to a region comprising at least 8 contiguous nucleic acids of SEQ ID NO: 2592, 2594, or 2595. In some embodiments, the ASO comprises a sequence that is at least about 80%, 85%, 90%, 95%, 97%, or 100% complimentary to any one of SEQ ID NOs: 1038-2591. In some embodiments, the targeted portion of the RIC pre-mRNA is within the region −73e to +499 relative to the 5′ splice site of the retained intron 18 or within the region −496 to +1,912e relative to the 3′ splice site of the retained intron 19. In some embodiments, the ASO comprises a sequence that is at least about 80%, 85%, 90%, 95%, 97%, or 100% complimentary to any one of SEQ ID NOs: 1038-1509 or 1815-2286. In some embodiments, the targeted portion of the RIC pre-mRNA is within the region −73e to −4e relative to the 5′ splice site of the retained intron 18. In some embodiments, the ASO comprises a sequence that is at least about 80%, 85%, 90%, 95%, 97%, or 100% complimentary to any one of SEQ ID NOs: 1038-1050 or 1815-1827. In some embodiments, the targeted portion of the RIC pre-mRNA is in retained intron 18 within the region +6 to +499 relative to the 5′ splice site of the retained intron 18. In some embodiments, the ASO comprises a sequence that is at least about 80%, 85%, 90%, 95%, 97%, or 100% complimentary to any one of SEQ ID NOs: 1051-1136 or 1828-1913. In some embodiments, the targeted portion of the RIC pre-mRNA is in retained intron 19 within the region −16 to −496 relative to the 3′ splice site of the retained intron 19. In some embodiments, the ASO comprises a sequence that is at least about 80%, 85%, 90%, 95%, 97%, or 100% complimentary to any one of SEQ ID NOs: 1137-1228 or 1914-2005. In some embodiments, the targeted portion of the RIC pre-mRNA is within the region +17e to +1,912e relative to the 3′ splice site of the retained intron 19. In some embodiments, the ASO comprises a sequence that is at least about 80%, 85%, 90%, 95%, 97%, or 100% complimentary to any one of SEQ ID NOs: 1229-1509 or 2006-2286.

[0012] In some embodiments of any of the aforementioned methods, the target protein is SYNGAP1. In some embodiments, the targeted portion of the RIC pre-mRNA is within the region −1,054e to +251 relative to the 5′ splice site of the retained intron 15 or within the region −256 to +157e relative to the 3′ splice site of the retained intron 15. In some embodiments, the ASO comprises a sequence that is at least about 80%, 85%, 90%, 95%, 97%, or 100% complimentary to any one of SEQ ID NOs: 1510-1814 or 2287-2591. In some embodiments, the targeted portion of the RIC pre-mRNA is within the region −4e to −1,054e relative to the 5′ splice site of the retained intron 15. In some embodiments, the ASO comprises a sequence that is at least about 80%, 85%, 90%, 95%, 97%, or 100% complimentary to any one of SEQ ID NOs: 1510-1686 or 2287-2463. In some embodiments, the targeted portion of the RIC pre-mRNA is in retained intron 15 within the region +6 to +251 relative to the 5′ splice site of the retained intron 15. In some embodiments, the ASO comprises a sequence that is at least about 80%, 85%, 90%, 95%, 97%, or 100% complimentary to any one of SEQ ID NOs: 1687-1736 or 2464-2513. In some embodiments, the targeted portion of the RIC pre-mRNA is in retained intron 15 within the region −16 to −256 relative to the 3′ splice site of the retained intron 15. In some embodiments, the ASO comprises a sequence that is at least about 80%, 85%, 90%, 95%, 97%, or 100% complimentary to any one of SEQ ID NOs: 1737-1785 or 2514-2562. In some embodiments, the targeted portion of the RIC pre-mRNA is within the region +2e to +157e relative to the 3′ splice site of the retained intron 15. In some embodiments, the ASO comprises a sequence that is at least about 80%, 85%, 90%, 95%, 97%, or 100% complimentary to any one of SEQ ID NOs: 1786-1814 or 2563-2591.

[0013] In some embodiments of any of the aforementioned methods, the antisense oligomer does not increase the amount of the target protein or the functional RNA by modulating alternative splicing of pre-mRNA transcribed from a gene encoding the functional RNA or target protein. In some embodiments, the antisense oligomer does not increase the amount of the target protein or the functional RNA by modulating aberrant splicing resulting from mutation of the gene encoding the target protein or the functional RNA. In some embodiments, the RIC pre-mRNA was produced by partial splicing of a full-length pre-mRNA or partial splicing of a wild-type pre-mRNA. In some embodiments, the mRNA encoding the target protein or functional RNA is a full-length mature mRNA, or a wild-type mature mRNA. In some embodiments, the target protein produced is full-length protein, or wild-type protein. In some embodiments, the total amount of the mRNA encoding the target protein or functional RNA produced in the cell contacted with the antisense oligomer is increased about 1.1 to about 10-fold, about 1.5 to about 10-fold, about 2 to about 10-fold, about 3 to about 10-fold, about 4 to about 10-fold, about 1.1 to about 5-fold, about 1.1 to about 6-fold, about 1.1 to about 7-fold, about 1.1 to about 8-fold, about 1.1 to about 9-fold, about 2 to about 5-fold, about 2 to about 6-fold, about 2 to about 7-fold, about 2 to about 8-fold, about 2 to about 9-fold, about 3 to about 6-fold, about 3 to about 7-fold, about 3 to about 8-fold, about 3 to about 9-fold, about 4 to about 7-fold, about 4 to about 8-fold, about 4 to about 9-fold, at least about 1.1-fold, at least about 1.5-fold, at least about 2-fold, at least about 2.5-fold, at least about 3-fold, at least about 3.5-fold, at least about 4-fold, at least about 5-fold, or at least about 10-fold, compared to the total amount of the mRNA encoding the target protein or functional RNA produced in a control cell. In some embodiments, the total amount of target protein produced by the cell contacted with the antisense oligomer is increased about 1.1 to about 10-fold, about 1.5 to about 10-fold, about 2 to about 10-fold, about 3 to about 10-fold, about 4 to about 10-fold, about 1.1 to about 5-fold, about 1.1 to about 6-fold, about 1.1 to about 7-fold, about 1.1 to about 8-fold, about 1.1 to about 9-fold, about 2 to about 5-fold, about 2 to about 6-fold, about 2 to about 7-fold, about 2 to about 8-fold, about 2 to about 9-fold, about 3 to about 6-fold, about 3 to about 7-fold, about 3 to about 8-fold, about 3 to about 9-fold, about 4 to about 7-fold, about 4 to about 8-fold, about 4 to about 9-fold, at least about 1.1-fold, at least about 1.5-fold, at least about 2-fold, at least about 2.5-fold, at least about 3-fold, at least about 3.5-fold, at least about 4-fold, at least about 5-fold, or at least about 10-fold, compared to the total amount of target protein produced by a control cell.

[0014] In some embodiments of any of the aforementioned methods, the antisense oligomer comprises a backbone modification comprising a phosphorothioate linkage or a phosphorodiamidate linkage. In some embodiments, the antisense oligomer comprises a phosphorodiamidate morpholino, a locked nucleic acid, a peptide nucleic acid, a 2′-O-methyl, a 2′-Fluoro, or a 2′-O-methoxyethyl moiety. In some embodiments, the antisense oligomer comprises at least one modified sugar moiety. In some embodiments, each sugar moiety is a modified sugar moiety. In some embodiments, the antisense oligomer consists of from 8 to 50 nucleobases, 8 to 40 nucleobases, 8 to 35 nucleobases, 8 to 30 nucleobases, 8 to 25 nucleobases, 8 to 20 nucleobases, 8 to 15 nucleobases, 9 to 50 nucleobases, 9 to 40 nucleobases, 9 to 35 nucleobases, 9 to 30 nucleobases, 9 to 25 nucleobases, 9 to 20 nucleobases, 9 to 15 nucleobases, 10 to 50 nucleobases, 10 to 40 nucleobases, 10 to 35 nucleobases, 10 to 30 nucleobases, 10 to 25 nucleobases, 10 to 20 nucleobases, 10 to 15 nucleobases, 11 to 50 nucleobases, 11 to 40 nucleobases, 11 to 35 nucleobases, 11 to 30 nucleobases, 11 to 25 nucleobases, 11 to 20 nucleobases, 11 to 15 nucleobases, 12 to 50 nucleobases, 12 to 40 nucleobases, 12 to 35 nucleobases, 12 to 30 nucleobases, 12 to 25 nucleobases, 12 to 20 nucleobases, or 12 to 15 nucleobases. In some embodiments, the antisense oligomer is at least 80%, at least 85%, at least 90%, at least 95%, at least 98%, at least 99%, or 100%, complementary to the targeted portion of the RIC pre-mRNA encoding the protein.

[0015] In some embodiments of any of the aforementioned methods, the cell comprises a population of RIC pre-mRNAs transcribed from the gene encoding the target protein or functional RNA, wherein the population of RIC pre-mRNAs comprises two or more retained introns, and wherein the antisense oligomer binds to the most abundant retained intron in the population of RIC pre-mRNAs. In some embodiments, the binding of the antisense oligomer to the most abundant retained intron induces splicing out of the two or more retained introns from the population of RIC pre-mRNAs to produce mRNA encoding the target protein or functional RNA. In some embodiments, the cell comprises a population of RIC pre-mRNAs transcribed from the gene encoding the target protein or functional RNA, wherein the population of RIC pre-mRNAs comprises two or more retained introns, and wherein the antisense oligomer binds to the second most abundant retained intron in the population of RIC pre-mRNAs. In some embodiments, the binding of the antisense oligomer to the second most abundant retained intron induces splicing out of the two or more retained introns from the population of RIC pre-mRNAs to produce mRNA encoding the target protein or functional RNA. In some embodiments, the method further comprises assessing SYNGAP1 or SCN1A protein expression.

[0016] In some embodiments of any of the aforementioned methods, the MRD5 is treated and wherein the antisense oligomer binds to a targeted portion of a SYNGAP1 RIC pre-mRNA, wherein the targeted portion is within a sequence selected from SEQ ID NOs: 1038-2591, or wherein DS is treated and wherein the antisense oligomer binds to a targeted portion of a SCN1A RIC pre-mRNA, wherein the targeted portion is within a sequence selected from SEQ ID NOs: 10-1037. In some embodiments, the subject is a human. In some embodiments, the subject is a non-human animal. In some embodiments, the subject is a fetus, an embryo, or a child. In some embodiments, the cells are ex vivo. In some embodiments, the antisense oligomer is administered by intrathecal injection, intracerebroventricular injection, intraperitoneal injection, intramuscular injection, subcutaneous injection, or intravenous injection of the subject. In some embodiments, the 9 nucleotides at −3e to −1e of the exon flanking the 5′ splice site and +1 to +6 of the retained intron, are identical to the corresponding wild-type sequence. In some embodiments, the 16 nucleotides at −15 to −1 of the retained intron and +1e of the exon flanking the 3′ splice site are identical to the corresponding wild-type sequence. Disclosed herein, in some embodiments, are antisense oligomers as described in any of the aforementioned methods.

[0017] Disclosed herein, in some embodiments, are antisense oligomers comprising a sequence with at least about 80%, 85%, 90%, 95%, 97%, or 100% sequence identity to any one of SEQ ID NOs: 10-2591.

[0018] Also disclosed herein, in some embodiments, are pharmaceutical compositions comprising the antisense oligomer of claim 90 or 91 and a pharmaceutically acceptable excipient, diluent, or carrier.

[0019] Disclosed herein, in some embodiments, are methods of treating a subject in need thereof, by administering the pharmaceutical composition of claim 92 by intrathecal injection, intracerebroventricular injection, intraperitoneal injection, intramuscular injection, subcutaneous injection, or intravenous injection.

[0020] Disclosed herein, in some embodiments, are compositions comprising an antisense oligomer for use in a method of increasing expression of a target protein or a functional RNA by cells to treat MRD5 or DS in a subject in need thereof, associated with a deficient protein or deficient functional RNA, wherein the deficient protein or deficient functional RNA is deficient in amount or activity in the subject, wherein the antisense oligomer enhances constitutive splicing of a retained intron-containing pre-mRNA (RIC pre-mRNA) encoding the target protein or the functional RNA, wherein the target protein is: (a) the deficient protein; or (b) a compensating protein which functionally augments or replaces the deficient protein or in the subject; and wherein the functional RNA is: (c) the deficient RNA; or (d) a compensating functional RNA which functionally augments or replaces the deficient functional RNA in the subject; wherein the RIC pre-mRNA comprises a retained intron, an exon flanking the 5′ splice site and an exon flanking the 3′ splice site, and wherein the retained intron is spliced from the RIC pre-mRNA encoding the target protein or the functional RNA, thereby increasing production or activity of the target protein or the functional RNA in the subject.

[0021] Disclosed herein, in some embodiments, are compositions comprising an antisense oligomer for use in a method of treating a condition associated with SYNGAP1 or SCN1A protein in a subject in need thereof, the method comprising the step of increasing expression of SYNGAP1 or SCN1A protein by cells of the subject, wherein the cells have a retained-intron-containing pre-mRNA (RIC pre-mRNA) comprising a retained intron, an exon flanking the 5′ splice site of the retained intron, an exon flanking the 3′ splice site of the retained intron, and wherein the RIC pre-mRNA encodes the SYNGAP1 or SCN1A protein, the method comprising contacting the cells with the antisense oligomer, whereby the retained intron is constitutively spliced from the RIC pre-mRNA transcripts encoding SYNGAP1 or SCN1A protein, thereby increasing the level of mRNA encoding SYNGAP1 or SCN1A protein, and increasing the expression of SYNGAP1 or SCN1A protein, in the cells of the subject. In some embodiments, the condition is a disease or disorder. In some embodiments, the disease or disorder is AD mental retardation 5 or Dravet syndrome. In some embodiments, the target protein and RIC pre-mRNA are encoded by the SYNGAP1 or SCN1A gene. In some embodiments, the antisense oligomer targets a portion of the RIC pre-mRNA that is in the retained intron within the region +6 relative to the 5′ splice site of the retained intron to −16 relative to the 3′ splice site of the retained intron. In some embodiments, the antisense oligomer targets a portion of the RIC pre-mRNA that is in the retained intron within: (a) the region +6 to +499 relative to the 5′ splice site of the retained intron; or (b) the region −16 to −496 relative to the 3′ splice site of the retained intron. In some embodiments, the antisense oligomer targets a portion of the RIC pre-mRNA that is within the region about 100 nucleotides downstream of the 5′ splice site of the at least one retained intron, to about 100 nucleotides upstream of the 3′ splice site of the at least one retained intron. In some embodiments, the targeted portion of the RIC pre-mRNA is within: (a) the region +2e to −4e in the exon flanking the 5′ splice site of the retained intron; or (b) the region +2e to −4e in the exon flanking the 3′ splice site of the retained intron. In some embodiments, the targeted portion of the RIC pre-mRNA is within: (a) the region −4e to −1,054e relative to the 5′ splice site of the retained intron; (b) the region +6 to +499 relative to the 5′ splice site of the retained intron; (c) the region −16 to −496 relative to the 3′ splice site of the retained intron; or (d) the region +2e to +1,912e relative to the 3′ splice site of the retained intron.

[0022] In some embodiments of any of the aforementioned compositions, the target protein is SCN1A. In some embodiments, the RIC pre-mRNA comprises a sequence with at least about 80%, 85%, 90%, 95%, 97%, or 100% sequence identity to any one of SEQ ID NOs: 4-7. In some embodiments, the RIC pre-mRNA is encoded by a genetic sequence with at least about 80%, 85%, 90%, 95%, 97%, or 100% sequence identity to SEQ ID NO: 1. In some embodiments, the targeted portion of the RIC pre-mRNA comprises a sequence with at least 80%, 85%, 90%, 95%, 97%, or 100% sequence identity to a region comprising at least 8 contiguous nucleic acids of SEQ ID NO: 2593. In some embodiments, the ASO comprises a sequence that is at least about 80%, 85%, 90%, 95%, 97%, or 100% complimentary to any one of SEQ ID NOs: 10-1037. In some embodiments, the targeted portion of the RIC pre-mRNA is within the region −264e to +496 relative to the 5′ splice site of the retained intron 21 or within the region −496 to +37e relative to the 3′ splice site of the retained intron 21. In some embodiments, the ASO comprises a sequence that is at least about 80%, 85%, 90%, 95%, 97%, or 100% complimentary to any one of SEQ ID NOs: 10-266 or 524-1037. In some embodiments, the targeted portion of the RIC pre-mRNA is within the region −264e to −4e relative to the 5′ splice site of the retained intron 21. In some embodiments, the ASO comprises a sequence that is at least about 80%, 85%, 90%, 95%, 97%, or 100% complimentary to any one of SEQ ID NOs: 10-62, 524-576, or 781-833. In some embodiments, the targeted portion of the RIC pre-mRNA is in retained intron 21 within the region +6 to +496 relative to the 5′ splice site of the retained intron 21. In some embodiments, the ASO comprises a sequence that is at least about 80%, 85%, 90%, 95%, 97%, or 100% complimentary to any one of SEQ ID NOs: 63-162, 577-675, or 834-932. In some embodiments, the targeted portion of the RIC pre-mRNA is in retained intron 21 within the region −16 to −496 relative to the 3′ splice site of the retained intron 21. In some embodiments, the ASO comprises a sequence that is at least about 80%, 85%, 90%, 95%, 97%, or 100% complimentary to any one of SEQ ID NOs: 163-258, 676-772, or 933-1029. In some embodiments, the targeted portion of the RIC pre-mRNA is within the region +2e to +37e relative to the 3′ splice site of the retained intron 21. In some embodiments, the ASO comprises a sequence that is at least about 80%, 85%, 90%, 95%, 97%, or 100% complimentary to any one of SEQ ID NOs: 259-266, 773-780, or 1030-1037.

[0023] In some embodiments of any of the aforementioned compositions, the target protein is SCN1A. In some embodiments, the targeted portion of the RIC pre-mRNA is within the region −264e to +496 relative to the 5′ splice site of the retained intron 23 or within the region −496 to +37e relative to the 3′ splice site of the retained intron 23. In some embodiments, the ASO comprises a sequence that is at least about 80%, 85%, 90%, 95%, 97%, or 100% complimentary to any one of SEQ ID NOs: 267-523. In some embodiments, the targeted portion of the RIC pre-mRNA is within the region −264e to −4e relative to the 5′ splice site of the retained intron 23. In some embodiments, the ASO comprises a sequence that is at least about 80%, 85%, 90%, 95%, 97%, or 100% complimentary to any one of SEQ ID NOs: 267-319. In some embodiments, the targeted portion of the RIC pre-mRNA is in retained intron 23 within the region +6 to +496 relative to the 5′ splice site of the retained intron 23. In some embodiments, the ASO comprises a sequence that is at least about 80%, 85%, 90%, 95%, 97%, or 100% complimentary to any one of SEQ ID NOs: 320-418. In some embodiments, the targeted portion of the RIC pre-mRNA is in retained intron 23 within the region −16 to −496 relative to the 3′ splice site of the retained intron 23. In some embodiments, the ASO comprises a sequence that is at least about 80%, 85%, 90%, 95%, 97%, or 100% complimentary to any one of SEQ ID NOs: 419-515. In some embodiments, the targeted portion of the RIC pre-mRNA is within the region +2e to +37e relative to the 3′ splice site of the retained intron 23. In some embodiments, the ASO comprises a sequence that is at least about 80%, 85%, 90%, 95%, 97%, or 100% complimentary to any one of SEQ ID NOs: 516-523.

[0024] In some embodiments of any of the aforementioned compositions, the target protein is SYNGAP1. In some embodiments, the RIC pre-mRNA comprises a sequence with at least about 80%, 85%, 90%, 95%, 97%, or 100% sequence identity to any one of SEQ ID NOs: 8 or 9. In some embodiments, the RIC pre-mRNA is encoded by a genetic sequence with at least about 80%, 85%, 90%, 95%, 97%, or 100% sequence identity to SEQ ID NO: 2 or 3. In some embodiments, the targeted portion of the RIC pre-mRNA comprises a sequence with at least 80%, 85%, 90%, 95%, 97%, or 100% sequence identity to a region comprising at least 8 contiguous nucleic acids of SEQ ID NO: 2592, 2594, or 2595. In some embodiments, the ASO comprises a sequence that is at least about 80%, 85%, 90%, 95%, 97%, or 100% complimentary to any one of SEQ ID NOs: 1038-2591. In some embodiments, the targeted portion of the RIC pre-mRNA is within the region −73e to +499 relative to the 5′ splice site of the retained intron 18 or within the region −496 to +1,912e relative to the 3′ splice site of the retained intron 19. In some embodiments, the ASO comprises a sequence that is at least about 80%, 85%, 90%, 95%, 97%, or 100% complimentary to any one of SEQ ID NOs: 1038-1509 or 1815-2286. In some embodiments, the targeted portion of the RIC pre-mRNA is within the region −73e to −4e relative to the 5′ splice site of the retained intron 18. In some embodiments, the ASO comprises a sequence that is at least about 80%, 85%, 90%, 95%, 97%, or 100% complimentary to any one of SEQ ID NOs: 1038-1050 or 1815-1827. In some embodiments, the targeted portion of the RIC pre-mRNA is in retained intron 18 within the region +6 to +499 relative to the 5′ splice site of the retained intron 18. In some embodiments, the ASO comprises a sequence that is at least about 80%, 85%, 90%, 95%, 97%, or 100% complimentary to any one of SEQ ID NOs: 1051-1136 or 1828-1913. In some embodiments, the targeted portion of the RIC pre-mRNA is in retained intron 19 within the region −16 to −496 relative to the 3′ splice site of the retained intron 19. In some embodiments, the ASO comprises a sequence that is at least about 80%, 85%, 90%, 95%, 97%, or 100% complimentary to any one of SEQ ID NOs: 1137-1228 or 1914-2005. In some embodiments, the targeted portion of the RIC pre-mRNA is within the region +17e to +1,912e relative to the 3′ splice site of the retained intron 19. In some embodiments, the ASO comprises a sequence that is at least about 80%, 85%, 90%, 95%, 97%, or 100% complimentary to any one of SEQ ID NOs: 1229-1509 or 2006-2286.

[0025] In some embodiments of any of the aforementioned compositions, the target protein is SYNGAP1. In some embodiments, the targeted portion of the RIC pre-mRNA is within the region −1,054e to +251 relative to the 5′ splice site of the retained intron 15 or within the region −256 to +157e relative to the 3′ splice site of the retained intron 15. In some embodiments, the ASO comprises a sequence that is at least about 80%, 85%, 90%, 95%, 97%, or 100% complimentary to any one of SEQ ID NOs: 1510-1814 or 2287-2591. In some embodiments, the targeted portion of the RIC pre-mRNA is within the region −4e to −1,054e relative to the 5′ splice site of the retained intron 15. In some embodiments, the ASO comprises a sequence that is at least about 80%, 85%, 90%, 95%, 97%, or 100% complimentary to any one of SEQ ID NOs: 1510-1686 or 2287-2463. In some embodiments, the targeted portion of the RIC pre-mRNA is in retained intron 15 within the region +6 to +251 relative to the 5′ splice site of the retained intron 15. In some embodiments, the ASO comprises a sequence that is at least about 80%, 85%, 90%, 95%, 97%, or 100% complimentary to any one of SEQ ID NOs: 1687-1736 or 2464-2513. In some embodiments, the targeted portion of the RIC pre-mRNA is in retained intron 15 within the region −16 to −256 relative to the 3′ splice site of the retained intron 15. In some embodiments, the ASO comprises a sequence that is at least about 80%, 85%, 90%, 95%, 97%, or 100% complimentary to any one of SEQ ID NOs: 1737-1785 or 2514-2562. In some embodiments, the targeted portion of the RIC pre-mRNA is within the region +2e to +157e relative to the 3′ splice site of the retained intron 15. In some embodiments, the ASO comprises a sequence that is at least about 80%, 85%, 90%, 95%, 97%, or 100% complimentary to any one of SEQ ID NOs: 1786-1814 or 2563-2591.

[0026] In some embodiments of any of the aforementioned compositions, the antisense oligomer does not increase the amount of target protein or functional RNA by modulating alternative splicing of the pre-mRNA transcribed from a gene encoding the target protein or functional RNA. In some embodiments, the antisense oligomer does not increase the amount of the functional RNA or functional protein by modulating aberrant splicing resulting from mutation of the gene encoding the target protein or functional RNA. In some embodiments, the RIC pre-mRNA was produced by partial splicing from a full-length pre-mRNA or a wild-type pre-mRNA. In some embodiments, the mRNA encoding the target protein or functional RNA is a full-length mature mRNA, or a wild-type mature mRNA. In some embodiments, the target protein produced is full-length protein, or wild-type protein. In some embodiments, the retained intron is a rate-limiting intron. In some embodiments, the retained intron is the most abundant retained intron in said RIC pre-mRNA. In some embodiments, the retained intron is the second most abundant retained intron in said RIC pre-mRNA.

[0027] In some embodiments of any of the aforementioned compositions, the antisense oligomer comprises a backbone modification comprising a phosphorothioate linkage or a phosphorodiamidate linkage. In some embodiments, the antisense oligomer is an antisense oligonucleotide. In some embodiments, the antisense oligomer comprises a phosphorodiamidate morpholino, a locked nucleic acid, a peptide nucleic acid, a 2′-O-methyl, a 2′-Fluoro, or a 2′-O-methoxyethyl moiety. In some embodiments, the antisense oligomer comprises at least one modified sugar moiety. In some embodiments, each sugar moiety is a modified sugar moiety. In some embodiments, the antisense oligomer consists of from 8 to 50 nucleobases, 8 to 40 nucleobases, 8 to 35 nucleobases, 8 to 30 nucleobases, 8 to 25 nucleobases, 8 to 20 nucleobases, 8 to 15 nucleobases, 9 to 50 nucleobases, 9 to 40 nucleobases, 9 to 35 nucleobases, 9 to 30 nucleobases, 9 to 25 nucleobases, 9 to 20 nucleobases, 9 to 15 nucleobases, 10 to 50 nucleobases, 10 to 40 nucleobases, 10 to 35 nucleobases, 10 to 30 nucleobases, 10 to 25 nucleobases, 10 to 20 nucleobases, 10 to 15 nucleobases, 11 to 50 nucleobases, 11 to 40 nucleobases, 11 to 35 nucleobases, 11 to 30 nucleobases, 11 to 25 nucleobases, 11 to 20 nucleobases, 11 to 15 nucleobases, 12 to 50 nucleobases, 12 to 40 nucleobases, 12 to 35 nucleobases, 12 to 30 nucleobases, 12 to 25 nucleobases, 12 to 20 nucleobases, or 12 to 15 nucleobases.

[0028] Disclosed herein, in some embodiments, are pharmaceutical compositions comprising the antisense oligomer of any of the compositions of claims 94 to 167, and a pharmaceutically acceptable excipient, diluent, or carrier. Also disclosed herein, in some embodiments, are methods of treating a subject in need thereof, by administering the pharmaceutical composition of claim 168 by intrathecal injection, intracerebroventricular injection, intraperitoneal injection, intramuscular injection, subcutaneous injection, or intravenous injection.

[0029] Disclosed herein, in some embodiments, are pharmaceutical compositions comprising: an antisense oligomer that hybridizes to a target sequence of a SCN1A or SYNGAP1 mRNA transcript, wherein the SCN1A or SYNGAP1 mRNA transcript comprises a retained intron, wherein the antisense oligomer induces splicing out of the retained intron from the SCN1A or SYNGAP1 mRNA transcript; and a pharmaceutically acceptable excipient, diluent, or carrier. In some embodiments, the SCN1A or SYNGAP1 mRNA transcript is a SCN1A or SYNGAP1 RIC pre-mRNA transcript. In some embodiments, the targeted portion of the SCN1A or SYNGAP1 RIC pre-mRNA transcript is in the retained intron within the region +500 relative to the 5′ splice site of the retained intron to −500 relative to the 3′ spliced site of the retained intron. In some embodiments, the SCN1A or SYNGAP1 RIC pre-mRNA transcript is encoded by a genetic sequence with at least about 80%, 85%, 90%, 95%, 96%, 97%, 98%, 99% or 100% sequence identity to any one of SEQ ID NOs: 1-3. In some embodiments, the SCN1A or SYNGAP1 RIC pre-mRNA transcript comprises a sequence with at least about 80%, 85%, 90%, 95%, 96%, 97%, 98%, 99% or 100% sequence identity to any one of SEQ ID NOs: 4-9. In some embodiments, the antisense oligomer comprises a backbone modification comprising a phosphorothioate linkage or a phosphorodiamidate linkage. In some embodiments, the antisense oligomer is an antisense oligonucleotide. In some embodiments, the antisense oligomer comprises a phosphorodiamidate morpholino, a locked nucleic acid, a peptide nucleic acid, a 2′-O-methyl, a 2′-Fluoro, or a 2′-O-methoxyethyl moiety. In some embodiments, the antisense oligomer comprises at least one modified sugar moiety. In some embodiments, the antisense oligomer comprises from 8 to 50 nucleobases, 8 to 40 nucleobases, 8 to 35 nucleobases, 8 to 30 nucleobases, 8 to 25 nucleobases, 8 to 20 nucleobases, 8 to 15 nucleobases, 9 to 50 nucleobases, 9 to 40 nucleobases, 9 to 35 nucleobases, 9 to 30 nucleobases, 9 to 25 nucleobases, 9 to 20 nucleobases, 9 to 15 nucleobases, 10 to 50 nucleobases, 10 to 40 nucleobases, 10 to 35 nucleobases, 10 to 30 nucleobases, 10 to 25 nucleobases, 10 to 20 nucleobases, 10 to 15 nucleobases, 11 to 50 nucleobases, 11 to 40 nucleobases, 11 to 35 nucleobases, 11 to 30 nucleobases, 11 to 25 nucleobases, 11 to 20 nucleobases, 11 to 15 nucleobases, 12 to 50 nucleobases, 12 to 40 nucleobases, 12 to 35 nucleobases, 12 to 30 nucleobases, 12 to 25 nucleobases, 12 to 20 nucleobases, or 12 to 15 nucleobases. In some embodiments, the antisense oligomer is at least 80%, at least 85%, at least 90%, at least 95%, at least 98%, at least 99%, or is 100% complementary to a targeted portion of the SCN1A or SYNGAP1 RIC pre-mRNA transcript. In some embodiments, the targeted portion of the SCN1A or SYNGAP1 RIC pre-mRNA transcript is within a sequence selected from SEQ ID NOs: 2592-2595. In some embodiments, the antisense oligomer comprises a nucleotide sequence that is at least about 80%, 85%, 90%, 91%, 92%, 93%, 94%, 95%, 96%, 97%, 98%, or 99% sequence identity to any one of SEQ ID NOs: 10-2591. In some embodiments, the antisense oligomer comprises a nucleotide sequence selected from SEQ ID NOs: 10-2591. In some embodiments, the pharmaceutical composition is formulated for intrathecal injection, intracerebroventricular injection, intraperitoneal injection, intramuscular injection, subcutaneous injection, or intravenous injection.

[0030] Disclosed herein, in some embodiments, are methods of inducing processing of a deficient SCN1A or SYNGAP1 mRNA transcript to facilitate removal of a retained intron to produce a fully processed SCN1A or SYNGAP1 mRNA transcript that encodes a functional form of a SCN1A or SYNGAP1 protein, the method comprising: (a) contacting an antisense oligomer to a target cell of a subject; (b) hybridizing the antisense oligomer to the deficient SCN1A or SYNGAP1 mRNA transcript, wherein the deficient SCN1A or SYNGAP1 mRNA transcript is capable of encoding the functional form of a SCN1A or SYNGAP1 protein and comprises at least one retained intron; (c) removing the at least one retained intron from the deficient SCN1A or SYNGAP1 mRNA transcript to produce the fully processed SCN1A or SYNGAP1 mRNA transcript that encodes the functional form of SCN1A or SYNGAP1 protein; and (d) translating the functional form of SCN1A or SYNGAP1 protein from the fully processed SCN1A or SYNGAP1 mRNA transcript. In some embodiments, the retained intron is an entire retained intron. In some embodiments, the deficient SCN1A or SYNGAP1 mRNA transcript is a SCN1A or SYNGAP1 pre-mRNA transcript.

[0031] Disclosed herein, in some embodiments, are methods of treating a subject having a condition caused by a deficient amount or activity of SCN1A or SYNGAP1 protein comprising administering to the subject an antisense oligomer comprising a nucleotide sequence with at least about 80%, 85%, 90%, 91%, 92%, 93%, 94%, 95%, 96%, 97%, 98%, or 99% sequence identity to any one of SEQ ID NOs: 10-2591.

### INCORPORATION BY REFERENCE

[0032] All publications, patents, and patent applications mentioned in this specification are herein incorporated by reference to the same extent as if each individual publication, patent, or patent application was specifically and individually indicated to be incorporated by reference.

### BRIEF DESCRIPTION OF THE DRAWINGS

[0033] The novel features of the invention are set forth with particularity in the appended claims. A better understanding of the features and advantages of the present invention will be obtained by reference to the following detailed description that sets forth illustrative embodiments, in which the principles of the invention are utilized, and the accompanying drawings.

[0034] FIG. 1 depicts a schematic representation of an exemplary retained-intron-containing (RIC) pre-mRNA transcript. In FIG. 1, the 5′ splice site consensus sequence is indicated with underlined letters (letters are nucleotides; upper case: exonic portion; and lower case: intronic portion) from −3e to −1e and +1 to +6 (numbers labeled “e” are exonic and unlabeled numbers are intronic). The 3′ splice site consensus sequence is indicated with underlined letters (letters are nucleotides; upper case: exonic portion and lower case: intronic portion) from −15 to −1 and +1e (numbers labeled “e” are exonic and unlabeled numbers are intronic). Intronic target regions for ASO screening comprise nucleotides +6 relative to the 5′ splice site of the retained intron (arrow at left) to −16 relative to the 3′ splice site of the retained intron (arrow at right). In embodiments, intronic target regions for ASO screening comprise nucleotides +6 to +496 relative to the 5′ splice site of the retained intron and −16 to −499 relative to the 3′ splice site of the retained intron. Exonic target regions comprise nucleotides +2e to −4e in the exon flanking the 5′ splice site of the retained intron and +2e to −4e in the exon flanking the 3′ splice site of the retained intron. “n” or “N” denote any nucleotide, “y” denotes pyrimidine. The sequences shown represent consensus sequences for mammalian splice sites and individual introns and exons need not match the consensus sequences at every position.

[0035] FIGS. 2A-B depict a schematic representation of the Targeted Augmentation of Nuclear Gene Output (TANGO) approach. FIG. 2A shows a cell divided into nuclear and cytoplasmic compartments. In the nucleus, a pre-mRNA transcript of a target gene consisting of exons (rectangles) and introns (connecting lines) undergoes splicing to generate an mRNA, and this mRNA is exported to the cytoplasm and translated into target protein. For this target gene, the splicing of intron 1 is inefficient and a retained intron-containing (RIC) pre-mRNA accumulates primarily in the nucleus, and if exported to the cytoplasm, is degraded, leading to no target protein production. FIG. 2B shows an example of the same cell divided into nuclear and cytoplasmic compartments. Treatment with an antisense oligomer (ASO) promotes the splicing of intron 1 and results in an increase in mRNA, which is in turn translates into higher levels of target protein.

[0036] FIG. 3 depicts intron-retention in the SYNGAP1 gene with intron 15 shown in detail. The identification of intron-retention events in the SYNGAP1 gene using RNA sequencing (RNAseq) is shown, visualized in the UCSC genome browser. The upper panel shows the read density corresponding to the SYNGAP1 transcript expressed in HCN (human cortical neurons) and localized in either the cytoplasmic (top) or nuclear fraction (bottom). At the bottom of this panel, a graphic representation of the SYNGAP1 gene is shown to scale. The read density is shown as peaks. The highest read density corresponds to exons (black boxes), while no reads are observed for the majority of the introns (lines with arrow heads) in either cellular fraction. Higher read density is detected for introns 15 and 18/19 (pointed by the arrows) in the nuclear fraction compared to the cytoplasmic fraction indicating that splicing efficiency of introns 15 and 18/19 is low, resulting in intron retention. The retained-intron containing pre-mRNA transcripts are retained in the nucleus and are not exported out to the cytoplasm. The read density for intron 15 in HCN is shown in detail in the lower panel indicating 25% intron retention as calculated by bioinformatic analysis.

[0037] FIG. 4 depicts an exemplary SYNGAP1 gene intron 15 (IVS15) ASO walk. A graphic representation of the ASO walk performed for SYNGAP1 IVS 15 targeting sequences immediately downstream of the 5′ splice site or upstream of the 3′ splice site using 2′-O-Me ASOs, PS backbone, is shown. ASOs were designed to cover these regions by shifting 5 nucleotides at a time. The SYNGAP1 exon-intron structure is drawn to scale.

[0038] FIG. 5 depicts intron-retention in the SYNGAP1 gene with introns 18 and 19 shown in detail. Intron retention in the SYNGAP1 gene was identified by RNA sequencing (RNAseq), visualized in the UCSC genome browser, as described herein in the Examples. The read density for introns 18 and 19 in HCN is shown in detail in the lower panel. Introns 18 and 19 flank exon 19, an alternatively spliced exon. Even though exon 19 is not annotated, evidence of its existence is shown by the RNAseq data, such that a clear peak is observed in the cytoplasmic fraction; however the read density corresponding to exon 19 in the cytoplasmic fraction is lower than that of the constitutively spliced exons in SYNGAP1. The read density for intron 18/19 in HCN is shown in detail in the lower panel indicating 42% intron retention as calculated by bioinformatic analysis.

[0039] FIG. 6 depicts an exemplary SYNGAP1 gene intron 18 (IVS18) and intron 19 (IVS19) ASO walk. A graphic representation of the ASO walk performed for SYNGAP1 IVS 18 and 19 targeting sequences immediately downstream of the 5′ splice site of intron 18 or upstream of the 3′ splice site of intron 19 using 2′-O-Me ASOs, PS backbone, is shown. The splice site intronic regions flanking alternative exon 19 are not targeted to avoid affecting the inclusion level of exon 19. ASOs were designed to cover these regions by shifting 5 nucleotides at a time. The SYNGAP1 exon-intron structure is drawn to scale.

[0040] FIG. 7A depicts a schematic of the RefSeq Genes for SYNGAP1 corresponding to NM_006772.

[0041] FIG. 7B depicts an exemplary graph showing the average (n=3) fold change in expression levels of SYNGAP1 mRNA without intron 15 in ARPE-19 cells treated for 24 hrs with 80 nM of the indicated ASOs over mock treated cells. Data is normalized to RPL32 expression.

[0042] FIG. 7C depicts a schematic of the RefSeq Genes for SYNGAP1 corresponding to NM_006772.

[0043] FIG. 7D depicts an exemplary graph showing the average (n=3) fold change in expression levels of SYNGAP1 mRNA without intron 18 in ARPE-19 cells treated for 24 hrs with 80 nM of the indicated ASOs over mock treated cells. Data is normalized to RPL32 expression.

[0044] FIG. 7E depicts an exemplary graph showing the average (n=3) fold change in expression levels of SYNGAP1 mRNA without intron 18 in ARPE-19 cells treated for 24 hrs with 80 nM of the indicated ASOs over mock treated cells. Data is normalized to RPL32 expression.

[0045] FIG. 8A depicts a schematic of a portion of the RefSeq Gene for SCN1A corresponding to NM 006920. Primers used for the RT-PCR assay in FIG. 8B and FIG. 8C are shown.

[0046] FIG. 8B depicts an agarose gel showing expression levels of SCN1A mRNA as measured by RT-PCR in the indicated cells (VM and CX: ReNcell Neuroprogenitor cells; SK-N-AS: Neuroblastoma cells; C: cytoplasmic fraction; N: nuclear fraction).

[0047] FIG. 8C depicts an agarose gel showing intron 21 retention levels in SK-N-AS cells (left) and VM cells (right) as measured by RT-PCR (VM and CX: ReNcell Neuroprogenitor cells; SK-N-AS: Neuroblastoma cells; C: cytoplasmic fraction; N: nuclear fraction).

[0048] FIG. 8D depicts an exemplary graph showing the average (n=2) fold change in expression levels of SCN1A mRNA without intron 21 in SK-N-AS cells treated for 24 hrs with 80 nM of the indicated ASOs over mock treated cells. Data is normalized to RPL32 expression.

[0049] FIG. 8E depicts an exemplary graph showing the average (n=2) fold change in expression levels of SCN1A mRNA without intron 21 in SK-N-AS cells treated for 24 hrs with 80 nM of the indicated ASOs over mock treated cells. Data is normalized to RPL32 expression.

[0050] FIG. 8F depicts an exemplary graph showing the average (n=2) fold change in expression levels of SCN1A mRNA without intron 21 in SK-N-AS cells treated for 24 hrs with 40 nM, 80 nM or 120 nM of the indicated ASOs (spanning the exon 21-exon 22 splice junction) over mock treated cells. Data is normalized to RPL32 expression.

[0051] FIG. 8G depicts an exemplary graph showing the average (n=2) fold change in expression levels of SCN1A mRNA without intron 21 in SK-N-AS cells treated for 24 hrs with 80 nM of the indicated ASOs over mock treated cells. Data is normalized to RPL32 expression.

[0052] FIG. 8H depicts the sequences of the ASOs used in the experiments shown in FIG. 8D and FIG. 8E.

[0053] FIG. 8I depicts the sequences of the ASOs used in the experiments shown in FIG. 8G.

### DETAILED DESCRIPTION OF THE INVENTION

[0054] Individual introns in primary transcripts of protein-coding genes having more than one intron are spliced from the primary transcript with different efficiencies. In most cases only the fully spliced mRNA is exported through nuclear pores for subsequent translation in the cytoplasm. Unspliced and partially spliced transcripts are detectable in the nucleus. It is generally thought that nuclear accumulation of transcripts that are not fully spliced is a mechanism to prevent the accumulation of potentially deleterious mRNAs in the cytoplasm that may be translated to protein. For some genes, splicing of the least efficient intron is a rate-limiting post-transcriptional step in gene expression, prior to translation in the cytoplasm.

[0055] Substantial levels of partially-spliced transcripts encoding the SCN1A protein, deficient in AD mental retardation 5, and partially-spliced transcripts encoding the SYNGAP1 protein, deficient in Dravet syndrome, have been discovered in the nucleus of human cells. These SCN1A and SYNGAP1 pre-mRNA species comprise at least one retained intron. The present invention provides compositions and methods for upregulating splicing of one or more retained SYNGAP1 or SCN1A introns that are rate-limiting for the nuclear stages of gene expression to increase steady-state production of fully-spliced, mature mRNA, and thus, translated SYNGAP1 or SCN1A protein levels. These compositions and methods utilize antisense oligomers (ASOs) that promote constitutive splicing at intron splice sites of a retained-intron-containing SYNGAP1 or SCN1A pre-mRNA (RIC pre-mRNA) that accumulates in the nucleus. Thus, in embodiments, SYNGAP1 or SCN1A protein is increased using the methods of the invention to treat a condition caused by SYNGAP1 or SCN1A deficiency, respectively.

[0056] In other embodiments, the methods of the invention are used to increase SYNGAP1 or SCN1A production to treat a condition in a subject in need thereof. In embodiments, the subject has condition in which SYNGAP1 or SCN1A is not necessarily deficient relative to wild-type, but where an increase in SYNGAP1 or SCN1A mitigates the condition nonetheless. In embodiments, the condition is a caused by a SYNGAP1 or SCN1A haploinsufficiency.

### Autosomal Dominant Mental Retardation 5

[0057] Mental retardation is the most frequently occurring severe handicap of children. The nonsyndromic form of the disorder is the most common, characterized by the absence of dysmorphic features. Monoallelic lesions are sufficient to cause the disorder that is characterized by global delay of development, hypotonia, and moderate to severe mental retardation. The genetic factors involved in nonsyndromic mental retardation remain poorly understood. Linkage and cytogenetic analyses have led to the identification of 29 X-linked and 5 autosomal recessive genes associated with nonsyndromic mental retardation, which together account for less than 10% of cases (Hamden, et al., 2009, incorporated herein by reference). Moreover, autosomal dominant genes have yet to be identified, which in turn decreases the likelihood of identifying families that are amenable to linkage analysis. However, the fact that de novo chromosomal rearrangements, usually involving a change in copy number of genomic regions, represent the most commonly recognized cause of mental retardation indicates that monoallelic lesions are sufficient to cause this disorder. This raises the possibility that smaller de novo genetic lesions, such as point mutations, also contribute to the pathogenesis of the disorder. A case study identified de novo genetic lesions in the SYNGAP1 gene that result in the production of truncated proteins in approximately 3% of patients with unexplained nonsyndromic mental retardation. The patients identified in the study were heterozygous for the protein-truncating mutations that comprised two nonsense mutations and one deletion (Hamdan, et al., 2009). The disease is described, e.g., at OMIM #612621 (Online Mendelian Inheritance in Man, Johns Hopkins University, 1966-2015), incorporated by reference herein.

[0058] SYNGAP1 is a GTPase-activating enzyme that is selectively expressed in the brain. A component of the N-methyl-D-aspartate (NMDA)-receptor complex that mediates glutamate signaling, SYNGAP1 acts downstream of the receptor, blocking insertion of the α-amino-3-hydroxy-5-methyl-4-isoxazole propionic acid (AMPA) receptor at the postsynaptic membrane by inhibiting the RAS-ERK signaling pathway. SYNGAP1 is required for normal development; mice homozygous for null alleles of the gene die shortly after birth. By contrast, mice heterozygous for the null allele have impaired synaptic plasticity and learning, consistent with the role of SYNGAP1 as a component of the NMDA-receptor complex (Hamdan, et al., 2009).

[0059] Alternative splicing of the SYNGAP1 gene results in the expression of three isoforms of SYNGAP1 (Hamdan, et al., 2009). SYNGAP1 possesses a RASGAP domain that activates Ras GTPases. A PDZ-binding motif, QTRV, is present in isoform 2 that mediates interaction with other components of the NMDA-receptor complex. The RASGAP and QRTV domains regulate synaptic plasticity and dendritic-spine formation that are necessary for learning and development. Protein-truncating mutations associated with mental retardation lacked either the complete RASGAP domain or QTRV motifs, consistent with their role in the pathogenesis of mental retardation.

### Dravet Syndrome

[0060] Dravet syndrome (DS), otherwise known as severe myoclonic epilepsy of infancy (SMEI), is an epileptic encephalopathy presenting in the first year of life. Dravet syndrome is an increasingly recognized epileptic encephalopathy in which the clinical diagnosis is supported by the finding of sodium channel gene mutations in approximately 70-80% of patients. Mutations of ion channel genes play a major role in the pathogenesis of a range of epilepsy syndromes, resulting in some epilepsies being regarded as channelopathies. Voltage-gated sodium channels (VGSCs) play an essential role in neuronal excitability; therefore, it is not surprising that many mutations associated with DS have been identified in the gene encoding a VGSC subunit. The disease is described by, e.g., Mulley, et al., 2005, and the disease description at OMIM #607208 (Online Mendelian Inheritance in Man, Johns Hopkins University, 1966-2015), both incorporated by reference herein.

[0061] Between 70% and 80% of patients carry sodium channel al subunit gene (SCN1A) abnormalities, and truncating mutations account for about 40%, and have a significant correlation with an earlier age of seizures onset. Sequencing mutations are found in about 70% of cases and comprise truncating (40%) and missense mutations (40%) with the remaining being splice-site changes. Most mutations are de novo, but familial mutations occur in 5-10% of cases and are usually missense in nature. The remaining SCN1A mutations comprise splice-site and missense mutations, most of which fall into the pore-forming region of the sodium channel. At present, over 500 mutations have been associated with DS and are randomly distributed along the gene (Mulley, et al., Neurol. 2006, 67, 1094-1095).

[0062] The SCN1A gene is located in the cluster of sodium channel genes on human chromosome 2q24 and encodes the α-pore forming subunits known as Nav1.1 of the neuronal voltage gated sodium channel. The SCN1A gene spans approximately 100 kb of genomic DNA and comprises 26 exons. The SCN1A protein consists of four domains, each with six-transmembrane segments. Two splice variants have been identified that result in a long and short isoform that differ in the presence or absence of 11 amino acids in the cytoplasmic loop between domains 1 and 2, in exon 11 (Miller, et al., 1993-2015, and Mulley, et al., 2005, 25, 535-542, incorporated herein by reference).

[0063] The identification of genes associated with nonsyndromic mental retardation and Dravet syndrome that encode proteins in well-characterized synaptic pathways offers the possibility of developing pharmacologic treatments to target the disorders and reduce their associated symptoms.

[0064] Retained Intron Containing Pre-mRNA (RIC Pre-mRNA)

[0065] In embodiments, the methods of the present invention exploit the presence of retained-intron-containing pre-mRNA (RIC pre-mRNA) transcribed from the SYNGAP1 or SCN1A and encoding SYNGAP1 or SCN1A protein, in the cell nucleus. Splicing of the identified SYNGAP1 or SCN1A RIC pre-mRNA species to produce mature, fully-spliced, SYNGAP1 or SCN1A mRNA, is induced using ASOs that stimulate splicing out of the retained introns. The resulting mature SYNGAP1 or SCN1A mRNA can be exported to the cytoplasm and translated, thereby increasing the amount of SYNGAP1 or SCN1A protein in the patient's cells and alleviating symptoms of AD mental retardation 5 or Dravet syndrome. This method, described further below, is known as Targeted Augmentation of Nuclear Gene Output (TANGO).

### SYNGAP1 Nuclear Transcripts

[0066] As described herein in the Examples, the SYNGAP1 gene was analyzed for intron-retention events and retention of intron 15 and 18/19 was observed. RNA sequencing (RNAseq), visualized in the UCSC genome browser, showed SYNGAP1 transcripts expressed in human cortical neurons (HCN) and localized in either the cytoplasmic or nuclear fraction. In both fractions, reads were not observed for the majority of the introns. However, higher read density was detected for introns 15 and 18/19 in the nuclear fraction compared to the cytoplasmic fraction indicating that splicing efficiency of introns 15 and 18/19 is low, resulting in intron retention. The retained-intron containing pre-mRNA transcripts are retained in the nucleus and are not exported out to the cytoplasm. The read density for introns 18/19 indicated 42% intron retention. The percent intron retention (PIR) value for introns 18/19 was obtained by averaging four values (54, 50, 35, 29), each determined in HCN cells using one of four different algorithms. The read density for intron 15 indicated 25% intron retention. The percent intron retention (PIR) value for intron 15 was obtained by averaging four values (49, 0, 26 and 23), each determined in HCN cells using one of four different algorithms.

[0067] In some embodiments, the ASOs disclosed herein target a RIC pre-mRNA transcribed from a SCN1A genomic sequence. In some embodiments, the ASO targets a RIC pre-mRNA transcript from a SCN1A genomic sequence comprising retained intron 21. In some embodiments, the ASO targets a RIC pre-mRNA transcript from a SCN1A genomic sequence comprising retained intron 23. In some embodiments, the ASO targets a RIC pre-mRNA transcript of SEQ ID NO: 1. In some embodiments, the ASO targets a RIC pre-mRNA transcript of SEQ ID NO: 1 comprising a retained intron 21. In some embodiments, the ASO targets a RIC pre-mRNA transcript of SEQ ID NO: 1 comprising a retained intron 23. In some embodiments, the ASOs disclosed herein target a SCN1A RIC pre-mRNA sequence. In some embodiments, the ASO targets a SCN1A RIC pre-mRNA sequence comprising a retained intron 21. In some embodiments, the ASO targets a SCN1A RIC pre-mRNA sequence comprising a retained intron 23. In some embodiments, the ASO targets a SCN1A RIC pre-mRNA sequence according to any one of SEQ ID NOs: 4-7. In some embodiments, the ASO targets a SCN1A RIC pre-mRNA sequence according to any one of SEQ ID NOs: 4, 6, or 7 comprising a retained intron 21. In some embodiments, the ASO targets a SCN1A RIC pre-mRNA sequence according to SEQ ID NO: 5 comprising a retained intron 23. In some embodiments, the ASOs disclosed herein target SEQ ID NO: 2593. In some embodiments, the ASO has a sequence according to any one of SEQ ID NOs: 10-1037.

[0068] In some embodiments, the ASO targets exon 21 of a SCN1A RIC pre-mRNA comprising a retained intron 21. In some embodiments, the ASO targets an exon 21 sequence upstream (or 5′) from the 5′ splice site of a SCN1A RIC pre-mRNA comprising a retained intron 21. In some embodiments, the ASO targets an exon sequence about 4 to about 264 nucleotides upstream (or 5′) from the 5′ splice site of a SCN1A RIC pre-mRNA comprising a retained intron 21. In some embodiments, the ASO has a sequence according to any one of SEQ ID NOs: 10-62, 524-576, or 781-833.

[0069] In some embodiments, the ASO targets intron 21 in a SCN1A RIC pre-mRNA comprising a retained intron 21. In some embodiments, the ASO targets an intron 21 sequence downstream (or 3′) from the 5′ splice site of a SCN1A RIC pre-mRNA comprising a retained intron 21. In some embodiments, the ASO targets an intron 21 sequence about 6 to about 496 nucleotides downstream (or 3′) from the 5′ splice site of a SCN1A RIC pre-mRNA comprising a retained intron 21. In some embodiments, the ASO has a sequence according to any one of SEQ ID NOs: 63-161, 577-675, or 834-932.

[0070] In some embodiments, the ASO targets an intron 21 sequence upstream (or 5′) from the 3′ splice site of a SCN1A RIC pre-mRNA comprising a retained intron 21. In some embodiments, the ASO targets an intron 21 sequence about 16 to about 496 nucleotides upstream (or 5′) from the 3′ splice site of a SCN1A RIC pre-mRNA a comprising retained intron 21. In some embodiments, the ASO has a sequence according to any one of SEQ ID NOs: 162-258, 676-772, or 933-1029.

[0071] In some embodiments, the ASO targets exon 22 in a SCN1A RIC pre-mRNA comprising a retained intron 21. In some embodiments, the ASO targets an exon 22 sequence downstream (or 3′) from the 3′ splice site of a SCN1A RIC pre-mRNA comprising a retained intron 21. In some embodiments, the ASO targets an exon 22 sequence about 2 to about 37 nucleotides downstream (or 3′) from the 3′ splice site of a SCN1A RIC pre-mRNA comprising a retained intron 21. In some embodiments, the ASO has a sequence according to any one of SEQ ID NOs: 259-266, 773-780, or 1030-1037.

[0072] In some embodiments, the ASO targets exon 23 of a SCN1A RIC pre-mRNA comprising a retained intron 23. In some embodiments, the ASO targets an exon 23 sequence upstream (or 5′) from the 5′ splice site of a SCN1A RIC pre-mRNA comprising a retained intron 23. In some embodiments, the ASO targets an exon sequence about 4 to about 264 nucleotides upstream (or 5′) from the 5′ splice site of a SCN1A RIC pre-mRNA comprising a retained intron 23. In some embodiments, the ASO has a sequence according to any one of SEQ ID NOs: 267-319.

[0073] In some embodiments, the ASO targets intron 23 in a SCN1A RIC pre-mRNA comprising a retained intron 23. In some embodiments, the ASO targets an intron 23 sequence downstream (or 3′) from the 5′ splice site of a SCN1A RIC pre-mRNA comprising a retained intron 23. In some embodiments, the ASO targets an intron 23 sequence about 6 to about 496 nucleotides downstream (or 3′) from the 5′ splice site of a SCN1A RIC pre-mRNA comprising a retained intron 23. In some embodiments, the ASO has a sequence according to any one of SEQ ID NOs: 320-419.

[0074] In some embodiments, the ASO targets an intron 23 sequence upstream (or 5′) from the 3′ splice site of a SCN1A RIC pre-mRNA comprising a retained intron 23. In some embodiments, the ASO targets an intron 23 sequence about 16 to about 496 nucleotides upstream (or 5′) from the 3′ splice site of a SCN1A RIC pre-mRNA a comprising retained intron 23. In some embodiments, the ASO has a sequence according to any one of SEQ ID NOs: 420-515.

[0075] In some embodiments, the ASO targets exon 24 in a SCN1A RIC pre-mRNA comprising a retained intron 23. In some embodiments, the ASO targets an exon 24 sequence downstream (or 3′) from the 3′ splice site of a SCN1A RIC pre-mRNA comprising a retained intron 23. In some embodiments, the ASO targets an exon 24 sequence about 2 to about 37 nucleotides downstream (or 3′) from the 3′ splice site of a SCN1A RIC pre-mRNA comprising a retained intron 23. In some embodiments, the ASO has a sequence according to any one of SEQ ID NOs: 516-523.

[0076] In some embodiments, the ASOs disclosed herein target a RIC pre-mRNA transcribed from a SYNGAP1 genomic sequence. In some embodiments, the ASO targets a RIC pre-mRNA transcript from a SYNGAP1 genomic sequence comprising retained intron 18. In some embodiments, the ASO targets a RIC pre-mRNA transcript from a SYNGAP1 genomic sequence comprising retained intron 19. In some embodiments, the ASO targets a RIC pre-mRNA transcript from a SYNGAP1 genomic sequence comprising retained intron 15. In some embodiments, the ASO targets a RIC pre-mRNA transcript of SEQ ID NO: 2. In some embodiments, the ASO targets a RIC pre-mRNA transcript of SEQ ID NO: 3. In some embodiments, the ASO targets a RIC pre-mRNA transcript of SEQ ID NO: 2 comprising a retained intron 18. In some embodiments, the ASO targets a RIC pre-mRNA transcript of SEQ ID NO: 2 comprising a retained intron 19. In some embodiments, the ASO targets a RIC pre-mRNA transcript of SEQ ID NO: 2 comprising a retained intron 15. In some embodiments, the ASO targets a RIC pre-mRNA transcript of SEQ ID NO: 3 comprising a retained intron 18. In some embodiments, the ASO targets a RIC pre-mRNA transcript of SEQ ID NO: 3 comprising a retained intron 19. In some embodiments, the ASO targets a RIC pre-mRNA transcript of SEQ ID NO: 3 comprising a retained intron 15. In some embodiments, the ASOs disclosed herein target a SYNGAP1 RIC pre-mRNA sequence. In some embodiments, the ASO targets a SYNGAP1 RIC pre-mRNA sequence comprising a retained intron 18. In some embodiments, the ASO targets a SYNGAP1 RIC pre-mRNA sequence comprising a retained intron 19. In some embodiments, the ASO targets a SYNGAP1 RIC pre-mRNA sequence comprising a retained intron 15. In some embodiments, the ASO targets a SYNGAP1 RIC pre-mRNA sequence according to any one of SEQ ID NOs: 8-9. In some embodiments, the ASO targets a SYNGAP1 RIC pre-mRNA sequence according to any one of SEQ ID NOs: 8-9 comprising a retained intron 18. In some embodiments, the ASO targets a SYNGAP1 RIC pre-mRNA sequence according to any one of SEQ ID NOs: 8-9 comprising a retained intron 19. In some embodiments, the ASO targets a SYNGAP1 RIC pre-mRNA sequence according to any one of SEQ ID NOs: 8-9 comprising a retained intron 15. In some embodiments, the ASOs disclosed herein target any one of SEQ ID NOs: 2592, 2594, or 2595. In some embodiments, the ASO has a sequence according to any one of SEQ ID NOs: 1038-2591.

[0077] In some embodiments, the ASO targets an exon sequence of a SYNGAP1 RIC pre-mRNA comprising a retained intron 18 or intron 19. In some embodiments, the ASO targets an exon sequence upstream (or 5′) from the 5′ splice site of a SYNGAP1 RIC pre-mRNA comprising a retained intron 18 or intron 19. In some embodiments, the ASO targets an exon sequence about 4 to about 73 nucleotides upstream (or 5′) from the 5′ splice site of a SYNGAP1 RIC pre-mRNA comprising a retained intron 18 or intron 19. In some embodiments, the ASO has a sequence according to any one of SEQ ID NOs: 1038-1050 or 1815-1827.

[0078] In some embodiments, the ASO targets intron 18 or intron 19 in a SYNGAP1 RIC pre-mRNA comprising a retained intron 18 or intron 19. In some embodiments, the ASO targets a sequence downstream (or 3′) from the 5′ splice site of a SYNGAP1 RIC pre-mRNA comprising a retained intron 18 or intron 19. In some embodiments, the ASO targets a sequence about 6 to about 499 nucleotides downstream (or 3′) from the 5′ splice site of a SYNGAP1 RIC pre-mRNA comprising a retained intron 18 or intron 19. In some embodiments, the ASO has a sequence according to any one of SEQ ID NOs: 1051-1136 or 1828-1913.

[0079] In some embodiments, the ASO targets an intron 18 or intron 19 sequence upstream (or 5′) from the 3′ splice site of a SYNGAP1 RIC pre-mRNA comprising a retained intron 18 or intron 19. In some embodiments, the ASO targets a sequence about 16 to about 496 nucleotides upstream (or 5′) from the 3′ splice site of a SYNGAP1 RIC pre-mRNA a comprising retained intron 18 or intron 19. In some embodiments, the ASO has a sequence according to any one of SEQ ID NOs: 1137-1228 or 1914-2005.

[0080] In some embodiments, the ASO targets an exon sequence in a SYNGAP1 RIC pre-mRNA comprising a retained intron 18 or intron 19. In some embodiments, the ASO targets an exon sequence downstream (or 3′) from the 3′ splice site of a SYNGAP1 RIC pre-mRNA comprising a retained intron 18 or intron 19. In some embodiments, the ASO targets an exon sequence about 17 to about 1,912 nucleotides downstream (or 3′) from the 3′ splice site of a SYNGAP1 RIC pre-mRNA comprising a retained intron 18 or intron 19. In some embodiments, the ASO has a sequence according to any one of SEQ ID NOs: 1229-1509 or 2006-2286.

[0081] In some embodiments, the ASO targets exon 15 of a SYNGAP1 RIC pre-mRNA comprising a retained intron 15. In some embodiments, the ASO targets an exon 15 sequence upstream (or 5′) from the 5′ splice site of a SYNGAP1 RIC pre-mRNA comprising a retained intron 15. In some embodiments, the ASO targets an exon sequence about 4 to about 1,054 nucleotides upstream (or 5′) from the 5′ splice site of a SYNGAP1 RIC pre-mRNA comprising a retained intron 15. In some embodiments, the ASO has a sequence according to any one of SEQ ID NOs: 1510-1686 or 2287-2463.

[0082] In some embodiments, the ASO targets intron 15 in a SYNGAP1 RIC pre-mRNA comprising a retained intron 15. In some embodiments, the ASO targets an intron 15 sequence downstream (or 3′) from the 5′ splice site of a SYNGAP1 RIC pre-mRNA comprising a retained intron 15. In some embodiments, the ASO targets an intron 15 sequence about 6 to about 251 nucleotides downstream (or 3′) from the 5′ splice site of a SYNGAP1 RIC pre-mRNA comprising a retained intron 15. In some embodiments, the ASO has a sequence according to any one of SEQ ID NOs: 1687-1736 or 2464-2513.

[0083] In some embodiments, the ASO targets an intron 15 sequence upstream (or 5′) from the 3′ splice site of a SYNGAP1 RIC pre-mRNA comprising a retained intron 15. In some embodiments, the ASO targets an intron 15 sequence about 16 to about 256 nucleotides upstream (or 5′) from the 3′ splice site of a SYNGAP1 RIC pre-mRNA a comprising retained intron 15. In some embodiments, the ASO has a sequence according to any one of SEQ ID NOs: 1737-1785 or 2514-2562.

[0084] In some embodiments, the ASO targets exon 16 in a SYNGAP1 RIC pre-mRNA comprising a retained intron 15. In some embodiments, the ASO targets an exon 16 sequence downstream (or 3′) from the 3′ splice site of a SYNGAP1 RIC pre-mRNA comprising a retained intron 15. In some embodiments, the ASO targets an exon 16 sequence about 2 to about 157 nucleotides downstream (or 3′) from the 3′ splice site of a SYNGAP1 RIC pre-mRNA comprising a retained intron 15. In some embodiments, the ASO has a sequence according to any one of SEQ ID NOs: 1786-1814 or 2563-2591.

[0085] In embodiments, the targeted portion of the SYNGAP1 RIC pre-mRNA is in intron 15, 18, or 19. The SYNGAP1 intron numbering used herein corresponds to the mRNA sequence at NM_006772.2. In embodiments, hybridization of an ASO to the targeted portion of the RIC pre-mRNA results in enhanced splicing at the splice site (5′ splice site or 3′ splice site) of at least one of retained introns 15, 18, or 19, and subsequently increases SYNGAP1 protein production. It is understood that the intron numbering may change in reference to a different SYNGAP1 isoform sequence. One of skill in the art can determine the corresponding intron number in any isoform based on an intron sequence provided herein or using the number provided in reference to the mRNA sequence at NM_006772.2. One of skill in the art also can determine the sequences of flanking exons in any SYNGAP1 isoform for targeting using the methods of the invention, based on an intron sequence provided herein or using the intron number provided in reference to the mRNA sequence at NM_006772.2.

[0086] In embodiments, the targeted portion of the SCN1A RIC pre-mRNA is in intron 1, 2, 3, 4, 5, 6, 7, 8, 9, 10, 11, 12, 13, 14, 15, 16, 17, 18, 19, 20, 21, 22, 23, 24, or 25 (intron numbering corresponding to the mRNA sequence at NM_001202435.1). In embodiments, hybridization of an ASO to the targeted portion of the RIC pre-mRNA results in enhanced splicing at the splice site (5′ splice site or 3′ splice site) of at least one of retained introns 1, 2, 3, 4, 5, 6, 7, 8, 9, 10, 11, 12, 13, 14, 15, 16, 17, 18, 19, 20, 21, 22, 23, 24, or 25, and subsequently increases SCN1A protein production. In embodiments, the targeted portion of the SCN1A RIC pre-mRNA is in intron 21 or 23. One of skill in the art can determine the corresponding intron number in any isoform based on an intron sequence provided herein or using the number provided in reference to the mRNA sequence at NM_006920, NM_001202435, NM_001165964, or NM_001165963. One of skill in the art also can determine the sequences of flanking exons in any SCN1A isoform for targeting using the methods of the invention, based on an intron sequence provided herein or using the intron number provided in reference to the mRNA sequence at NM_006920, NM_001202435, NM_001165964, or NM_001165963.

[0087] The degree of intron retention can be expressed as percent intron retention (PIR), the percentage of transcripts in which a given intron is retained. In brief, PIR can be calculated as the percentage of the average number of reads mapping to the exon-intron junctions, over the sum of the average of the exon-intron junction reads plus the exon-exon junction reads.

[0088] PIR values for SCN1A have been reported, e.g., by Braunschweig, et al., 2014, (see, e.g., Supplemental Table S9), incorporated by reference herein in its entirety. In embodiments, the methods and compositions of the invention are used to increase the expression of SCN1A by inducing constitutive splicing of a retained intron of an SCN1A RIC-pre-mRNA. In embodiments, the retained intron is any of introns 1-25. In embodiments, the retained intron is any of introns 2, 4, 6, 13, 14, 15, 16, 17, 18, 20, 21, 22, 23, 24, and 25. In embodiments, the retained intron is any of introns 15, 18, and 19. In embodiments, the retained intron can be any SCN1A intron. In embodiments, the retained intron is intron 21. In embodiments, the retained intron is intron 23. The SCN1A intron numbering used herein corresponds to the mRNA sequence at NM_001202435.1. It is understood that the intron numbering may change in reference to a different SCN1A isoform sequence.

### SYNGAP1 or SCN1A Protein Expression

[0089] As described above, SYNGAP1 mutations in AD nonsyndromic mental retardation are spread across the entire protein, and there is a high de novo mutation rate. Linkage and cytogenetic analysis have identified 29 X-linked and 5 autosomal recessive genes associated with AD nonsyndromic mental retardation, which account for less than 10% of cases. This suggests that smaller de novo genetic lesions, such as point mutations, may contribute to disease pathogenesis.

[0090] Also described above, SCN1A mutations in Dravet Syndrome are spread across the entire protein. More than 100 novel mutations have been identified throughout the gene with the more debilitating arising de novo. These comprise of truncations (47%), missense (43%), deletions (3%), and splice site mutations (7%). The percentage of subjects carrying SCN1A mutations varies between 33 and 100%. The majority of mutations are novel changes (88%).

[0091] In embodiments, the methods described herein are used to increase the production of a functional SYNGAP1 or SCN1A protein. As used herein, the term “functional” refers to the amount of activity or function of a SYNGAP1 or SCN1A protein that is necessary to eliminate any one or more symptoms of a treated condition, e.g., AD mental retardation 5 or Dravet syndrome. In embodiments, the methods are used to increase the production of a partially functional SYNGAP1 or SCN1A protein. As used herein, the term “partially functional” refers to any amount of activity or function of the SYNGAP1 or SCN1A protein that is less than the amount of activity or function that is necessary to eliminate or prevent any one or more symptoms of a disease or condition. In some embodiments, a partially functional protein or RNA will have at least 10%, at least 20%, at least 30%, at least 40%, at least 50%, at least 60%, at least 70%, at least 75%, at least 80%, at least 85%, at least 90%, or at least 95% less activity relative to the fully functional protein or RNA.

[0092] In embodiments, the method is a method of increasing the expression of the SYNGAP1 or SCN1A protein by cells of a subject having a RIC pre-mRNA encoding the SYNGAP1 or SCN1A protein, wherein the subject has AD mental retardation 5 or Dravet syndrome caused by a deficient amount of activity of SYNGAP1 or SCN1A protein, and wherein the deficient amount of the SYNGAP1 or SCN1A protein is caused by haploinsufficiency of the SYNGAP1 or SCN1A protein. In such an embodiment, the subject has a first allele encoding a functional SYNGAP1 or SCN1A protein, and a second allele from which the SYNGAP1 or SCN1A protein is not produced. In another such embodiment, the subject has a first allele encoding a functional SYNGAP1 or SCN1A protein, and a second allele encoding a nonfunctional SYNGAP1 or SCN1A protein. In another such embodiment, the subject has a first allele encoding a functional SYNGAP1 or SCN1A protein, and a second allele encoding a partially functional SYNGAP1 or SCN1A protein. In any of these embodiments, the antisense oligomer binds to a targeted portion of the RIC pre-mRNA transcribed from the first allele (encoding functional SYNGAP1 or SCN1A protein), thereby inducing constitutive splicing of the retained intron from the RIC pre-mRNA, and causing an increase in the level of mature mRNA encoding functional SYNGAP1 or SCN1A protein, and an increase in the expression of the SYNGAP1 or SCN1A protein in the cells of the subject.

[0093] In embodiments, the subject has a first allele encoding a functional SYNGAP1 or SCN1A protein, and a second allele encoding a partially functional SYNGAP1 or SCN1A protein, and the antisense oligomer binds to a targeted portion of the RIC pre-mRNA transcribed from the first allele (encoding functional SYNGAP1 or SCN1A protein) or a targeted portion of the RIC pre-mRNA transcribed from the second allele (encoding partially functional SYNGAP1 or SCN1A protein), thereby inducing constitutive splicing of the retained intron from the RIC pre-mRNA, and causing an increase in the level of mature mRNA encoding the SYNGAP1 or SCN1A protein, and an increase in the expression of functional or partially functional SYNGAP1 or SCN1A protein in the cells of the subject.

[0094] In related embodiments, the method is a method of using an ASO to increase the expression of a protein or functional RNA. In embodiments, an ASO is used to increase the expression of SYNGAP1 or SCN1A protein in cells of a subject having a RIC pre-mRNA encoding SYNGAP1 or SCN1A protein, wherein the subject has a deficiency, e.g., AD mental retardation 5 or Dravet syndrome, in the amount or function of a SYNGAP1 or SCN1A protein.

[0095] In embodiments, the RIC pre-mRNA transcript that encodes the protein that is causative of the disease or condition is targeted by the ASOs described herein. In some embodiments, a RIC pre-mRNA transcript that encodes a protein that is not causative of the disease is targeted by the ASOs. For example, a disease that is the result of a mutation or deficiency of a first protein in a particular pathway may be ameliorated by targeting a RIC pre-mRNA that encodes a second protein, thereby increasing production of the second protein. In some embodiments, the function of the second protein is able to compensate for the mutation or deficiency of the first protein (which is causative of the disease or condition).

[0096] In embodiments, the subject has:

[0097] (a) a first mutant allele from which
[0098] (i) the SYNGAP1 or SCN1A protein is produced at a reduced level compared to production from a wild-type allele,
[0099] (ii) the SYNGAP1 or SCN1A protein is produced in a form having reduced function compared to an equivalent wild-type protein, or
[0100] (iii) the SYNGAP1 or SCN1A protein or functional RNA is not produced; and

[0101] (b) a second mutant allele from which
[0102] (i) the SYNGAP1 or SCN1A protein is produced at a reduced level compared to production from a wild-type allele,
[0103] (ii) the SYNGAP1 or SCN1A protein is produced in a form having reduced function compared to an equivalent wild-type protein, or
[0104] (iii) the SYNGAP1 or SCN1A protein is not produced, and
   wherein the RIC pre-mRNA is transcribed from the first allele and/or the second allele. In these embodiments, the ASO binds to a targeted portion of the RIC pre-mRNA transcribed from the first allele or the second allele, thereby inducing constitutive splicing of the retained intron from the RIC pre-mRNA, and causing an increase in the level of mRNA encoding SYNGAP1 or SCN1A protein and an increase in the expression of the target protein or functional RNA in the cells of the subject. In these embodiments, the target protein or functional RNA having an increase in expression level resulting from the constitutive splicing of the retained intron from the RIC pre-mRNA is either in a form having reduced function compared to the equivalent wild-type protein (partially-functional), or having full function compared to the equivalent wild-type protein (fully-functional).

[0105] In embodiments, the level of mRNA encoding SYNGAP1 or SCN1A protein is increased 1.1 to 10-fold, when compared to the amount of mRNA encoding SYNGAP1 or SCN1A protein that is produced in a control cell, e.g., one that is not treated with the antisense oligomer or one that is treated with an antisense oligomer that does not bind to the targeted portion of the SYNGAP1 or SCN1A RIC pre-mRNA.

[0106] In embodiments, the condition caused by a deficient amount or activity of SYNGAP1 or SCN1A protein is not a condition caused by alternative or aberrant splicing of the retained intron to which the ASO is targeted. In embodiments, the condition caused by a deficient amount or activity of the SYNGAP1 or SCN1A protein is not a condition caused by alternative or aberrant splicing of any retained intron in a RIC pre-mRNA encoding the SYNGAP1 or SCN1A protein. In embodiments, alternative or aberrant splicing may occur in a pre-mRNA transcribed from the SYNGAP1 or SCN1A gene, however the compositions and methods of the invention do not prevent or correct this alternative or aberrant splicing.

[0107] In embodiments, a subject treated using the methods of the invention expresses a partially functional SYNGAP1 or SCN1A protein from one allele, wherein the partially functional SYNGAP1 or SCN1A protein is caused by a frameshift mutation, a nonsense mutation, a missense mutation, or a partial gene deletion. In embodiments, a subject treated using the methods of the invention expresses a nonfunctional SYNGAP1 or SCN1A protein from one allele, wherein the nonfunctional SYNGAP1 or SCN1A protein is caused by a frameshift mutation, a nonsense mutation, a missense mutation, a partial gene deletion, in one allele. In embodiments, a subject treated using the methods of the invention has a SYNGAP1 or SCN1A whole gene deletion, in one allele.

[0108] In embodiments, a subject has a SYNGAP1 or SCN1A missense mutation. A subject can have a SYNGAP1 and a SCN1A mutation. In some cases, a SYNGAP1 mutation can be a truncating mutation. A SYNGAP1 truncating mutation can be a K138X, R579X, or L813RfsX22 mutation. A K138X mutation can result in a truncated SYNGAP1 protein that may lack a RASGAP domain. Said K138X mutation can encode a c.412A→T mutation. In some cases, a R579X mutation may truncate SYNGAP1 in a region following a RASGAP domain. In embodiments, a c.2438delT may also truncate SYNGAP1 in a region following a RASGAP domain. In some cases, a L813RfsX22 mutation may encode a c.2438delT sequence of mutation. Said mutations can occur upstream of the 3′ terminus of a SYNGAP1 gene that can be alternatively spliced. In embodiments, mutations in said 3′ terminus may alter the encoding of a C-terminal portion of SYNGAP1 protein.

[0109] The present invention also discloses a splicing process that can produce at least three isoforms of said SYNGAP1. Isoforms of the present invention may also be mutated. In some cases, a SYNGAP1 isoform can consist of at least 1343 amino acids. An isoform may comprise functional domains. A first SYNGAP1 isoform can contain functional domains that are mutated. A SYNGAP1 isoform can have a pleckstrin homology domain, a C2 domain, RASGAP, SH3, CC domain, and a CamKII binding domain. A K138X mutation can be upstream of a pleckstrin homology domain. A K138X mutation can be within a pleckstrin homology domain. A K138X mutation can be downstream of a pleckstrin homology domain. A R579X mutation can be in a region of a RASGAP domain. A R579X mutation can also be adjacent to a RASGAP domain. Similarly, a L813RfsX22 mutation can be adjacent to a SH3 SYNGAP1 domain. A L813RfsX22 mutation can also be within a SH3 SYNGAP1 domain.

[0110] In embodiments, a mutation can also be present on a second or third isoform of said SYNGAP1.

[0111] In embodiments, a subject can have a mutation that is not determined. A mutation that is not determined may be a SYNGAP1 mutation or a SCN1A mutation. A mutation that is not determined may be a SYNGAP1 mutation. In some cases, a SYNGAP1 mutation can be I1115T. Said, I1115T mutation may code a c.3344T→C mutation. In certain embodiments, mutations in SYNGAP1 may be associated with diseases that are not nonsyndromic mental retardation. Mutations in SYNGAP1 can be associated with autism spectrum disorders and schizophrenia. In some cases, mutations that are associated with SYNGAP1 can be a polymorphism.

[0112] In embodiments of the present invention, a subject can have a mutation in SCN1A. Mutations in SCN1A can be spread throughout said gene. SCN1A protein can consist of four domains. Said SCN1A domains can have transmembrane segments. Mutations in said SCN1A protein may arise throughout said protein. Said SCN1A protein may consist of at least two isoforms. Mutations in SCN1A may comprise of R931C, R946C, M934I, R1648C, or R1648H. In some cases, mutations may be observed in a C-terminus of a SCN1A protein. Mutations in a SCN1A protein may also be found in loops between segments 5 and 6 of the first three domains of said SCN1A protein. In some cases, mutations may be observed in an N-terminus of a SCN1A protein. Mutations within SCN1A can be R222X, R712X, I227S, R1892X, W952X, R1245X, R1407X, W1434R, c.4338+1G>A, 51516X, L1670fsX1678, or K1846fsX1856. Mutations that can be targeted with the present invention may also encode a pore of an ion channel.

[0113] In embodiments, the present invention can be used to treat Dravet syndrome. In other embodiments, the present invention can be used to treat severe myclonic epilepsy of infancy (SMEI). In other embodiments, the present invention can treat borderline Dravet syndrome. The present invention can also treat borderline SMEI. Additionally, the present invention can treat generalized epilepsy with febrile seizures plus (GEFS+). GEFS+ may be associated with mutations in epilepsy-associated ion channel subunits such as SCN1B or GABRG2. The present invention can also treat sodium channelopathies. Sodium channelopathies may be associated with mutations in SCN1A. Sodium channelopathies may also be associated with subunits of said SCN1A, such as the beta subunit, SCN1B. In some cases, additional diseases associated with SCN1A mutations may also be treated with the present invention. Related SCN1A diseases associated with SCN1A mutations can be atypical myotonia congenita, hyperkalemic periodic paralysis, or paramyotonia congenita.

[0114] In embodiments, a subject having any SYNGAP1 or SCN1A mutation known in the art and described in the literature referenced above (e.g., by Hamdan, et al., 2009, Mulley, et al., 2005) is treated using the methods and compositions of the present invention. In embodiments, the mutation can be within any SYNGAP1 or SCN1A intron.

### Use of TANGO for Increasing SYNGAP1 or SCN1A Protein Expression

[0115] As described above, in embodiments, Targeted Augmentation of Nuclear Gene Output (TANGO) is used in the methods of the invention to increase expression of a SYNGAP1 or SCN1A protein. In these embodiments, a retained-intron-containing pre-mRNA (RIC pre-mRNA) encoding SYNGAP1 or SCN1A protein is present in the nucleus of a cell. Cells having a SYNGAP1 or SCN1A RIC pre-mRNA that comprises a retained intron, an exon flanking the 5′ splice site, and an exon flanking the 3′ splice site, encoding the SYNGAP1 or SCN1A protein, are contacted with antisense oligomers (ASOs) that are complementary to a targeted portion of the RIC pre-mRNA. Hybridization of the ASOs to the targeted portion of the RIC pre-mRNA results in enhanced splicing at the splice site (5′ splice site or 3′ splice site) of the retained intron and subsequently increases target protein production.

[0116] The terms “pre-mRNA,” and “pre-mRNA transcript” may be used interchangeably and refer to any pre-mRNA species that contains at least one intron. In embodiments, pre-mRNA or pre-mRNA transcripts comprise a 5′-7-methylguanosine cap and/or a poly-A tail. In embodiments, pre-mRNA or pre-mRNA transcripts comprise both a 5′-7-methylguanosine cap and a poly-A tail. In some embodiments, the pre-mRNA transcript does not comprise a 5′-7-methylguanosine cap and/or a poly-A tail. A pre-mRNA transcript is a non-productive messenger RNA (mRNA) molecule if it is not translated into a protein (or transported into the cytoplasm from the nucleus).

[0117] As used herein, a “retained-intron-containing pre-mRNA” (“RIC pre-mRNA”) is a pre-mRNA transcript that contains at least one retained intron. The RIC pre-mRNA contains a retained intron, an exon flanking the 5′ splice site of the retained intron, an exon flanking the 3′ splice site of the retained intron, and encodes the target protein. An “RIC pre-mRNA encoding a target protein” is understood to encode the target protein when fully spliced. A “retained intron” is any intron that is present in a pre-mRNA transcript when one or more other introns, such as an adjacent intron, encoded by the same gene have been spliced out of the same pre-mRNA transcript. In some embodiments, the retained intron is the most abundant intron in RIC pre-mRNA encoding the target protein. In embodiments, the retained intron is the most abundant intron in a population of RIC pre-mRNAs transcribed from the gene encoding the target protein in a cell, wherein the population of RIC pre-mRNAs comprises two or more retained introns. In embodiments, an antisense oligomer targeted to the most abundant intron in the population of RIC pre-mRNAs encoding the target protein induces splicing out of two or more retained introns in the population, including the retained intron to which the antisense oligomer is targeted or binds. In embodiments, a mature mRNA encoding the target protein is thereby produced. The terms “mature mRNA,” and “fully-spliced mRNA,” are used interchangeably herein to describe a fully processed mRNA encoding a target protein (e.g., mRNA that is exported from the nucleus into the cytoplasm and translated into target protein) or a fully processed functional RNA. The term “productive mRNA,” also can be used to describe a fully processed mRNA encoding a target protein. In embodiments, the targeted region is in a retained intron that is the most abundant intron in a RIC pre-mRNA encoding the SYNGAP1 or SCN1A protein. In embodiments, the most retained intron in a RIC pre-mRNA encoding the SYNGAP1 protein is intron 18/19. In embodiments, the most retained intron in a RIC pre-mRNA encoding the SYNGAP1 protein is intron 15.

[0118] In embodiments, a retained intron is an intron that is identified as a retained intron based on a determination of at least about 5%, at least about 10%, at least about 15%, at least about 20%, at least about 25%, at least about 30%, at least about 35%, at least about 40%, at least about 45%, or at least about 50%, retention. In embodiments, a retained intron is an intron that is identified as a retained intron based on a determination of about 5% to about 100%, about 5% to about 95%, about 5% to about 90%, about 5% to about 85%, about 5% to about 80%, about 5% to about 75%, about 5% to about 70%, about 5% to about 65%, about 5% to about 60%, about 5% to about 55%, about 5% to about 50%, about 5% to about 45%, about 5% to about 40%, about 5% to about 35%, about 5% to about 30%, about 5% to about 25%, about 5% to about 20%, about 5% to about 15%, about 10% to about 100%, about 10% to about 95%, about 10% to about 90%, about 10% to about 85%, about 10% to about 80%, about 10% to about 75%, about 10% to about 70%, about 10% to about 65%, about 10% to about 60%, about 10% to about 55%, about 10% to about 50%, about 10% to about 45%, about 10% to about 40%, about 10% to about 35%, about 10% to about 30%, about 10% to about 25%, about 10% to about 20%, about 15% to about 100%, about 15% to about 95%, about 15% to about 90%, about 15% to about 85%, about 15% to about 80%, about 15% to about 75%, about 15% to about 70%, about 15% to about 65%, about 15% to about 60%, about 15% to about 55%, about 15% to about 50%, about 15% to about 45%, about 15% to about 40%, about 15% to about 35%, about 15% to about 30%, about 15% to about 25%, about 20% to about 100%, about 20% to about 95%, about 20% to about 90%, about 20% to about 85%, about 20% to about 80%, about 20% to about 75%, about 20% to about 70%, about 20% to about 65%, about 20% to about 60%, about 20% to about 55%, about 20% to about 50%, about 20% to about 45%, about 20% to about 40%, about 20% to about 35%, about 20% to about 30%, about 25% to about 100%, about 25% to about 95%, about 25% to about 90%, about 25% to about 85%, about 25% to about 80%, about 25% to about 75%, about 25% to about 70%, about 25% to about 65%, about 25% to about 60%, about 25% to about 55%, about 25% to about 50%, about 25% to about 45%, about 25% to about 40%, or about 25% to about 35%, retention. ENCODE data (described by, e.g., Tilgner, et al., 2012, “Deep sequencing of subcellular RNA fractions shows splicing to be predominantly co-transcriptional in the human genome but inefficient for lncRNAs,” Genome Research 22(9):1616-25) can be used to aid in identifying retained introns.

[0119] As used herein, the term “comprise” or variations thereof such as “comprises” or “comprising” are to be read to indicate the inclusion of any recited feature (e.g., in the case of an antisense oligomer, a defined nucleobase sequence) but not the exclusion of any other features. Thus, as used herein, the term “comprising” is inclusive and does not exclude additional, unrecited features (e.g., in the case of an antisense oligomer, the presence of additional, unrecited nucleobases).

[0120] In embodiments of any of the compositions and methods provided herein, “comprising” may be replaced with “consisting essentially of” or “consisting of” The phrase “consisting essentially of” is used herein to require the specified feature(s) (e.g., nucleobase sequence) as well as those which do not materially affect the character or function of the claimed invention. As used herein, the term “consisting” is used to indicate the presence of the recited feature (e.g., nucleobase sequence) alone (so that in the case of an antisense oligomer consisting of a specified nucleobase sequence, the presence of additional, unrecited nucleobases is excluded).

[0121] In embodiments, the targeted region is in a retained intron that is the second most abundant intron in a RIC pre-mRNA encoding the SYNGAP1 or SCN1A protein. For example, the second most abundant retained intron may be targeted rather than the most abundant retained intron due to the uniqueness of the nucleotide sequence of the second most abundant retained intron, ease of ASO design to target a particular nucleotide sequence, and/or amount of increase in protein production resulting from targeting the intron with an ASO. In embodiments, the retained intron is the second most abundant intron in a population of RIC pre-mRNAs transcribed from the gene encoding the target protein in a cell, wherein the population of RIC pre-mRNAs comprises two or more retained introns. In embodiments, an antisense oligomer targeted to the second most abundant intron in the population of RIC pre-mRNAs encoding the target protein induces splicing out of two or more retained introns in the population, including the retained intron to which the antisense oligomer is targeted or binds. In embodiments, fully-spliced (mature) RNA encoding the target protein is thereby produced. In embodiments, the second-most retained intron in a RIC pre-mRNA encoding the SYNGAP1 protein is intron 15. In embodiments, the second-most retained intron in a RIC pre-mRNA encoding the SYNGAP1 protein is intron 18/19.

[0122] In embodiments, an ASO is complementary to a targeted region that is within a non-retained intron in a RIC pre-mRNA. In embodiments, the targeted portion of the RIC pre-mRNA is within: the region +6 to +100 relative to the 5′ splice site of the non-retained intron; or the region −16 to −100 relative to the 3′ splice site of the non-retained intron. In embodiments, the targeted portion of the RIC pre-mRNA is within the region +100 relative to the 5′ splice site of the non-retained intron to −100 relative to the 3′ splice site of the non-retained intron. As used to identify the location of a region or sequence, “within” is understood to include the residues at the positions recited. For example, a region +6 to +100 includes the residues at positions +6 and +100. In embodiments, fully-spliced (mature) RNA encoding the target protein is thereby produced.

[0123] In embodiments, the retained intron of the RIC pre-mRNA is an inefficiently spliced intron. As used herein, “inefficiently spliced” may refer to a relatively low frequency of splicing at a splice site adjacent to the retained intron (5′ splice site or 3′ splice site) as compared to the frequency of splicing at another splice site in the RIC pre-mRNA. The term “inefficiently spliced” may also refer to the relative rate or kinetics of splicing at a splice site, in which an “inefficiently spliced” intron may be spliced or removed at a slower rate as compared to another intron in a RIC pre-mRNA.

[0124] In embodiments, the 9-nucleotide sequence at −3e to −1e of the exon flanking the 5′ splice site and +1 to +6 of the retained intron is identical to the corresponding wild-type sequence. In embodiments, the 16 nucleotide sequence at −15 to −1 of the retained intron and +1e of the exon flanking the 3′ splice site is identical to the corresponding wild-type sequence. As used herein, the “wild-type sequence” refers to the nucleotide sequence for SYNGAP1 or SCN1A in the published reference genome deposited in the NCBI repository of biological and scientific information (operated by National Center for Biotechnology Information, National Library of Medicine, 8600 Rockville Pike, Bethesda, Md. USA 20894). Also used herein, a nucleotide position denoted with an “e” indicates the nucleotide is present in the sequence of an exon (e.g., the exon flanking the 5′ splice site or the exon flanking the 3′ splice site). As used herein, the “wild-type sequence” refers to the canonical sequence available at NCBI Gene ID 8831 for SYNGAP, and NCBI GENE ID 6323 for SCN1A.

[0125] The methods involve contacting cells with an ASO that is complementary to a portion of a pre-mRNA encoding SYNGAP1 or SCN1A protein, resulting in increased expression of SYNGAP1 or SCN1A. As used herein, “contacting” or administering to cells refers to any method of providing an ASO in immediate proximity with the cells such that the ASO and the cells interact. A cell that is contacted with an ASO will take up or transport the ASO into the cell. The method involves contacting a condition or disease-associated or condition or disease-relevant cell with any of the ASOs described herein. In some embodiments, the ASO may be further modified or attached (e.g., covalently attached) to another molecule to target the ASO to a cell type, enhance contact between the ASO and the condition or disease-associated or condition or disease-relevant cell, or enhance uptake of the ASO.

[0126] As used herein, the term “increasing protein production” or “increasing expression of a target protein” means enhancing the amount of protein that is translated from an mRNA in a cell. A “target protein” may be any protein for which increased expression/production is desired.

[0127] In embodiments, contacting a cell that expresses a SYNGAP1 or SCN1A RIC pre-mRNA with an ASO that is complementary to a targeted portion of the SYNGAP1 or SCN1A RIC pre-mRNA transcript results in a measurable increase in the amount of the SYNGAP1 or SCN1A protein (e.g., a target protein) encoded by the pre-mRNA. Methods of measuring or detecting production of a protein will be evident to one of skill in the art and include any known method, for example, Western blotting, flow cytometry, immunofluorescence microscopy, and ELISA.

[0128] In embodiments, contacting cells with an ASO that is complementary to a targeted portion of a SYNGAP1 or SCN1A RIC pre-mRNA transcript results in an increase in the amount of SYNGAP1 or SCN1A protein produced by at least 10, 20, 30, 40, 50, 60, 80, 100, 150, 200, 250, 300, 350, 400, 450, 500, or 1000%, compared to the amount of the protein produced by a cell in the absence of the ASO/absence of treatment. In embodiments, the total amount of SYNGAP1 or SCN1A protein produced by the cell to which the antisense oligomer was contacted is increased about 1.1 to about 10-fold, about 1.5 to about 10-fold, about 2 to about 10-fold, about 3 to about 10-fold, about 4 to about 10-fold, about 1.1 to about 5-fold, about 1.1 to about 6-fold, about 1.1 to about 7-fold, about 1.1 to about 8-fold, about 1.1 to about 9-fold, about 2 to about 5-fold, about 2 to about 6-fold, about 2 to about 7-fold, about 2 to about 8-fold, about 2 to about 9-fold, about 3 to about 6-fold, about 3 to about 7-fold, about 3 to about 8-fold, about 3 to about 9-fold, about 4 to about 7-fold, about 4 to about 8-fold, about 4 to about 9-fold, at least about 1.1-fold, at least about 1.5-fold, at least about 2-fold, at least about 2.5-fold, at least about 3-fold, at least about 3.5-fold, at least about 4-fold, at least about 5-fold, or at least about 10-fold, compared to the amount of target protein produced by an control compound. A control compound can be, for example, an oligonucleotide that is not complementary to the targeted portion of the RIC pre-mRNA.

[0129] In some embodiments, contacting cells with an ASO that is complementary to a targeted portion of a SYNGAP1 or SCN1A RIC pre-mRNA transcript results in an increase in the amount of mRNA encoding SYNGAP1 or SCN1A, including the mature mRNA encoding the target protein. In some embodiments, the amount of mRNA encoding SYNGAP1 or SCN1A protein, or the mature mRNA encoding the SYNGAP1 or SCN1A protein, is increased by at least 10, 20, 30, 40, 50, 60, 80, 100, 150, 200, 250, 300, 350, 400, 450, 500, or 1000%, compared to the amount of the protein produced by a cell in the absence of the ASO/absence of treatment. In embodiments, the total amount of the mRNA encoding SYNGAP1 or SCN1A protein, or the mature mRNA encoding SYNGAP1 or SCN1A protein produced in the cell to which the antisense oligomer was contacted is increased about 1.1 to about 10-fold, about 1.5 to about 10-fold, about 2 to about 10-fold, about 3 to about 10-fold, about 4 to about 10-fold, about 1.1 to about 5-fold, about 1.1 to about 6-fold, about 1.1 to about 7-fold, about 1.1 to about 8-fold, about 1.1 to about 9-fold, about 2 to about 5-fold, about 2 to about 6-fold, about 2 to about 7-fold, about 2 to about 8-fold, about 2 to about 9-fold, about 3 to about 6-fold, about 3 to about 7-fold, about 3 to about 8-fold, about 3 to about 9-fold, about 4 to about 7-fold, about 4 to about 8-fold, about 4 to about 9-fold, at least about 1.1-fold, at least about 1.5-fold, at least about 2-fold, at least about 2.5-fold, at least about 3-fold, at least about 3.5-fold, at least about 4-fold, at least about 5-fold, or at least about 10-fold compared to the amount of mature RNA produced in an untreated cell, e.g., an untreated cell or a cell treated with a control compound. A control compound can be, for example, an oligonucleotide that is not complementary to the targeted portion of the SYNGAP1 or SCN1A RIC pre-mRNA.

Constitutive Splicing of a Retained Intron from a RIC Pre-mRNA

[0130] The methods and antisense oligonucleotide compositions provided herein are useful for increasing the expression of SYNGAP1 or SCN1A protein in cells, for example, in a subject having AD mental retardation 5 or Dravet syndrome caused by a deficiency in the amount or activity of SYNGAP1 or SCN1A protein, by increasing the level of mRNA encoding SYNGAP1 or SCN1A protein, or the mature mRNA encoding SYNGAP1 or SCN1A protein. In particular, the methods and compositions as described herein induce the constitutive splicing of a retained intron from a SYNGAP1 or SCN1A RIC pre-mRNA transcript encoding SYNGAP1 or SCN1A protein, thereby increasing the level of mRNA encoding SYNGAP1 or SCN1A protein, or the mature mRNA encoding SYNGAP1 or SCN1A protein and increasing the expression of SYNGAP1 or SCN1A protein.

[0131] Constitutive splicing of a retained intron from a RIC pre-mRNA correctly removes the retained intron from the RIC pre-mRNA, wherein the retained intron has wild-type splice sequences. Constitutive splicing, as used herein, does not encompass splicing of a retained intron from a RIC pre-mRNA transcribed from a gene or allele having a mutation that causes alternative splicing or aberrant splicing of a pre-mRNA transcribed from the gene or allele. For example, constitutive splicing of a retained intron, as induced using the methods and antisense oligonucleotides provided herein, does not correct aberrant splicing in or influence alternative splicing of a pre-mRNA to result in an increased expression of a target protein or functional RNA.

[0132] In embodiments, constitutive splicing correctly removes a retained intron from a SYNGAP1 or SCN1A RIC pre-mRNA, wherein the SYNGAP1 or SCN1A RIC pre-mRNA is transcribed from a wild-type gene or allele, or a polymorphic gene or allele, that encodes a fully-functional target protein or functional RNA, and wherein the gene or allele does not have a mutation that causes alternative splicing or aberrant splicing of the retained intron.

[0133] In some embodiments, constitutive splicing of a retained intron from a SYNGAP1 or SCN1A RIC pre-mRNA encoding SYNGAP1 or SCN1A protein correctly removes a retained intron from a SYNGAP1 or SCN1A RIC pre-mRNA encoding SYNGAP1 or SCN1A protein, wherein the SYNGAP1 or SCN1A RIC pre-mRNA is transcribed from a gene or allele from which the target gene or functional RNA is produced at a reduced level compared to production from a wild-type allele, and wherein the gene or allele does not have a mutation that causes alternative splicing or aberrant splicing of the retained intron.

[0134] In these embodiments, the correct removal of the constitutively spliced retained intron results in production of target protein or functional RNA that is functional when compared to an equivalent wild-type protein or functional RNA.

[0135] In other embodiments, constitutive splicing correctly removes a retained intron from a SYNGAP1 or SCN1A RIC pre-mRNA, wherein the SYNGAP1 or SCN1A RIC pre-mRNA is transcribed from a gene or allele that encodes a target protein or functional RNA produced in a form having reduced function compared to an equivalent wild-type protein or functional RNA, and wherein the gene or allele does not have a mutation that causes alternative splicing or aberrant splicing of the retained intron. In these embodiments, the correct removal of the constitutively spliced retained intron results in production of partially functional target protein, or functional RNA that is partially functional when compared to an equivalent wild-type protein or functional RNA.

[0136] “Correct removal” of the retained intron by constitutive splicing refers to removal of the entire intron, without removal of any part of an exon.

[0137] In embodiments, an antisense oligomer as described herein or used in any method described herein does not increase the amount of mRNA encoding SYNGAP1 or SCN1A protein or the amount of SYNGAP1 or SCN1A protein by modulating alternative splicing or aberrant splicing of a pre-mRNA transcribed from SCN1A or SYNGAP1. Modulation of alternative splicing or aberrant splicing can be measured using any known method for analyzing the sequence and length of RNA species, e.g., by RT-PCR and using methods described elsewhere herein and in the literature. In embodiments, modulation of alternative or aberrant splicing is determined based on an increase or decrease in the amount of the spliced species of interest of at least 10% or 1.1-fold. In embodiments, modulation is determined based on an increase or decrease at a level that is at least 10% to 100% or 1.1 to 10-fold, as described herein regarding determining an increase in mRNA encoding SYNGAP1 or SCN1A protein in the methods of the invention.

[0138] In embodiments, the method is a method wherein the SYNGAP1 or SCN1A RIC pre-mRNA was produced by partial splicing of a wild-type SYNGAP1 or SCN1A pre-mRNA. In embodiments, the method is a method wherein the SYNGAP1 or SCN1A RIC pre-mRNA was produced by partial splicing of a full-length wild-type SYNGAP1 or SCN1A pre-mRNA. In embodiments, the SYNGAP1 or SCN1A RIC pre-mRNA was produced by partial splicing of a full-length SYNGAP1 or SCN1A pre-mRNA. In these embodiments, a full-length SYNGAP1 or SCN1A pre-mRNA may have a polymorphism in a splice site of the retained intron that does not impair correct splicing of the retained intron as compared to splicing of the retained intron having the wild-type splice site sequence.

[0139] In embodiments, the mRNA encoding SYNGAP1 or SCN1A protein is a full-length mature mRNA, or a wild-type mature mRNA. In these embodiments, a full-length mature mRNA may have a polymorphism that does not affect the activity of the target protein or the functional RNA encoded by the mature mRNA, as compared to the activity of SYNGAP1 or SCN1A protein encoded by the wild-type mature mRNA.

### Antisense Oligomers

[0140] One aspect of the present disclosure is a composition comprising antisense oligomers that enhances splicing by binding to a targeted portion of a SYNGAP1 or SCN1A RIC pre-mRNA. As used herein, the terms “ASO” and “antisense oligomer” are used interchangeably and refer to an oligomer such as a polynucleotide, comprising nucleobases that hybridizes to a target nucleic acid (e.g., a SYNGAP1 or SCN1A RIC pre-mRNA) sequence by Watson-Crick base pairing or wobble base pairing (G-U). The ASO may have exact sequence complementary to the target sequence or near complementarity (e.g., sufficient complementarity to bind the target sequence and enhancing splicing at a splice site). ASOs are designed so that they bind (hybridize) to a target nucleic acid (e.g., a targeted portion of a pre-mRNA transcript) and remain hybridized under physiological conditions. Typically, if they hybridize to a site other than the intended (targeted) nucleic acid sequence, they hybridize to a limited number of sequences that are not a target nucleic acid (to a few sites other than a target nucleic acid). Design of an ASO can take into consideration the occurrence of the nucleic acid sequence of the targeted portion of the pre-mRNA transcript or a sufficiently similar nucleic acid sequence in other locations in the genome or cellular pre-mRNA or transcriptome, such that the likelihood the ASO will bind other sites and cause “off-target” effects is limited. Any antisense oligomers known in the art, for example in PCT Application No. PCT/US2014/054151, published as WO 2015/035091, titled “Reducing Nonsense-Mediated mRNA Decay,” incorporated by reference herein, can be used to practice the methods described herein.

[0141] In some embodiments, ASOs “specifically hybridize” to or are “specific” to a target nucleic acid or a targeted portion of a RIC pre-mRNA. Typically such hybridization occurs with a Tm substantially greater than 37° C., preferably at least 50° C., and typically between 60° C. to approximately 90° C. Such hybridization preferably corresponds to stringent hybridization conditions. At a given ionic strength and pH, the Tm is the temperature at which 50% of a target sequence hybridizes to a complementary oligonucleotide.

[0142] Oligomers, such as oligonucleotides, are “complementary” to one another when hybridization occurs in an antiparallel configuration between two single-stranded polynucleotides. A double-stranded polynucleotide can be “complementary” to another polynucleotide, if hybridization can occur between one of the strands of the first polynucleotide and the second. Complementarity (the degree to which one polynucleotide is complementary with another) is quantifiable in terms of the proportion (e.g., the percentage) of bases in opposing strands that are expected to form hydrogen bonds with each other, according to generally accepted base-pairing rules. The sequence of an antisense oligomer (ASO) need not be 100% complementary to that of its target nucleic acid to hybridize. In certain embodiments, ASOs can comprise at least 70%, at least 75%, at least 80%, at least 85%, at least 90%, at least 95%, at least 96%, at least 97%, at least 98%, or at least 99% sequence complementarity to a target region within the target nucleic acid sequence to which they are targeted. For example, an ASO in which 18 of 20 nucleobases of the oligomeric compound are complementary to a target region, and would therefore specifically hybridize, would represent 90 percent complementarity. In this example, the remaining non-complementary nucleobases may be clustered together or interspersed with complementary nucleobases and need not be contiguous to each other or to complementary nucleobases. Percent complementarity of an ASO with a region of a target nucleic acid can be determined routinely using BLAST programs (basic local alignment search tools) and PowerBLAST programs known in the art (Altschul, et al., J. Mol. Biol., 1990, 215, 403-410; Zhang and Madden, Genome Res., 1997, 7, 649-656).

[0143] An ASO need not hybridize to all nucleobases in a target sequence and the nucleobases to which it does hybridize may be contiguous or noncontiguous. ASOs may hybridize over one or more segments of a pre-mRNA transcript, such that intervening or adjacent segments are not involved in the hybridization event (e.g., a loop structure or hairpin structure may be formed). In certain embodiments, an ASO hybridizes to noncontiguous nucleobases in a target pre-mRNA transcript. For example, an ASO can hybridize to nucleobases in a pre-mRNA transcript that are separated by one or more nucleobase(s) to which the ASO does not hybridize.

[0144] The ASOs described herein comprise nucleobases that are complementary to nucleobases present in a target portion of a RIC pre-mRNA. The term ASO embodies oligonucleotides and any other oligomeric molecule that comprises nucleobases capable of hybridizing to a complementary nucleobase on a target mRNA but does not comprise a sugar moiety, such as a peptide nucleic acid (PNA). The ASOs may comprise naturally-occurring nucleotides, nucleotide analogs, modified nucleotides, or any combination of two or three of the preceding. The term “naturally occurring nucleotides” includes deoxyribonucleotides and ribonucleotides. The term “modified nucleotides” includes nucleotides with modified or substituted sugar groups and/or having a modified backbone. In some embodiments, all of the nucleotides of the ASO are modified nucleotides. Chemical modifications of ASOs or components of ASOs that are compatible with the methods and compositions described herein will be evident to one of skill in the art and can be found, for example, in U.S. Pat. No. 8,258,109 B2, U.S. Pat. No. 5,656,612, U.S. Patent Publication No. 2012/0190728, and Dias and Stein, Mol. Cancer Ther. 2002, 347-355, herein incorporated by reference in their entirety.

[0145] The nucleobase of an ASO may be any naturally occurring, unmodified nucleobase such as adenine, guanine, cytosine, thymine and uracil, or any synthetic or modified nucleobase that is sufficiently similar to an unmodified nucleobase such that it is capable of hydrogen bonding with a nucleobase present on a target pre-mRNA. Examples of modified nucleobases include, without limitation, hypoxanthine, xanthine, 7-methylguanine, 5, 6-dihydrouracil, 5-methylcytosine, and 5-hydroxymethoylcytosine.

[0146] The ASOs described herein also comprise a backbone structure that connects the components of an oligomer. The term “backbone structure” and “oligomer linkages” may be used interchangeably and refer to the connection between monomers of the ASO. In naturally occurring oligonucleotides, the backbone comprises a 3′-5′ phosphodiester linkage connecting sugar moieties of the oligomer. The backbone structure or oligomer linkages of the ASOs described herein may include (but are not limited to) phosphorothioate, phosphorodithioate, phosphoroselenoate, phosphorodiselenoate, phosphoroanilothioate, phosphoraniladate, phosphoramidate, and the like. See, e.g., LaPlanche, et al., Nucleic Acids Res. 14:9081 (1986); Stec, et al., J. Am. Chem. Soc. 106:6077 (1984), Stein, et al., Nucleic Acids Res. 16:3209 (1988), Zon, et al., Anti Cancer Drug Design 6:539 (1991); Zon, et al., Oligonucleotides and Analogues: A Practical Approach, pp. 87-108 (F. Eckstein, Ed., Oxford University Press, Oxford England (1991)); Stec, et al., U.S. Pat. No. 5,151,510; Uhlmann and Peyman, Chemical Reviews 90:543 (1990). In some embodiments, the backbone structure of the ASO does not contain phosphorous but rather contains peptide bonds, for example in a peptide nucleic acid (PNA), or linking groups including carbamate, amides, and linear and cyclic hydrocarbon groups. In some embodiments, the backbone modification is a phosphothioate linkage. In some embodiments, the backbone modification is a phosphoramidate linkage.

[0147] In embodiments, the stereochemistry at each of the phosphorus internucleotide linkages of the ASO backbone is random. In embodiments, the stereochemistry at each of the phosphorus internucleotide linkages of the ASO backbone is controlled and is not random. For example, U.S. Pat. App. Pub. No. 2014/0194610, “Methods for the Synthesis of Functionalized Nucleic Acids,” incorporated herein by reference, describes methods for independently selecting the handedness of chirality at each phosphorous atom in a nucleic acid oligomer. In embodiments, an ASO used in the methods of the invention, including, but not limited to, any of the ASOs set forth herein in Table 1, comprises an ASO having phosphorus internucleotide linkages that are not random. In embodiments, a composition used in the methods of the invention comprises a pure diastereomeric ASO. In embodiments, a composition used in the methods of the invention comprises an ASO that has diastereomeric purity of at least about 90%, at least about 91%, at least about 92%, at least about 93%, at least about 94%, at least about 95%, at least about 96%, at least about 97%, at least about 98%, at least about 99%, about 100%, about 90% to about 100%, about 91% to about 100%, about 92% to about 100%, about 93% to about 100%, about 94% to about 100%, about 95% to about 100%, about 96% to about 100%, about 97% to about 100%, about 98% to about 100%, or about 99% to about 100%.

[0148] In embodiments, the ASO has a nonrandom mixture of Rp and Sp configurations at its phosphorus internucleotide linkages. For example, it has been suggested that a mix of Rp and Sp is required in antisense oligonucleotides to achieve a balance between good activity and nuclease stability (Wan, et al., 2014, “Synthesis, biophysical properties and biological activity of second generation antisense oligonucleotides containing chiral phosphorothioate linkages,” Nucleic Acids Research 42(22): 13456-13468, incorporated herein by reference). In embodiments, an ASO used in the methods of the invention, including, but not limited to, any of the ASOs set forth herein in Table 1, comprises about 5-100% Rp, at least about 5% Rp, at least about 10% Rp, at least about 15% Rp, at least about 20% Rp, at least about 25% Rp, at least about 30% Rp, at least about 35% Rp, at least about 40% Rp, at least about 45% Rp, at least about 50% Rp, at least about 55% Rp, at least about 60% Rp, at least about 65% Rp, at least about 70% Rp, at least about 75% Rp, at least about 80% Rp, at least about 85% Rp, at least about 90% Rp, or at least about 95% Rp, with the remainder Sp, or about 100% Rp. In embodiments, an ASO used in the methods of the invention, including, but not limited to, any of the ASOs set forth herein in Table 1, comprises about 10% to about 100% Rp, about 15% to about 100% Rp, about 20% to about 100% Rp, about 25% to about 100% Rp, about 30% to about 100% Rp, about 35% to about 100% Rp, about 40% to about 100% Rp, about 45% to about 100% Rp, about 50% to about 100% Rp, about 55% to about 100% Rp, about 60% to about 100% Rp, about 65% to about 100% Rp, about 70% to about 100% Rp, about 75% to about 100% Rp, about 80% to about 100% Rp, about 85% to about 100% Rp, about 90% to about 100% Rp, or about 95% to about 100% Rp, about 20% to about 80% Rp, about 25% to about 75% Rp, about 30% to about 70% Rp, about 40% to about 60% Rp, or about 45% to about 55% Rp, with the remainder Sp.

[0149] In embodiments, an ASO used in the methods of the invention, including, but not limited to, any of the ASOs set forth herein in Table 1, comprises about 5-100% Sp, at least about 5% Sp, at least about 10% Sp, at least about 15% Sp, at least about 20% Sp, at least about 25% Sp, at least about 30% Sp, at least about 35% Sp, at least about 40% Sp, at least about 45% Sp, at least about 50% Sp, at least about 55% Sp, at least about 60% Sp, at least about 65% Sp, at least about 70% Sp, at least about 75% Sp, at least about 80% Sp, at least about 85% Sp, at least about 90% Sp, or at least about 95% Sp, with the remainder Rp, or about 100% Sp. In embodiments, an ASO used in the methods of the invention, including, but not limited to, any of the ASOs set forth herein in Table 1, comprises about 10% to about 100% Sp, about 15% to about 100% Sp, about 20% to about 100% Sp, about 25% to about 100% Sp, about 30% to about 100% Sp, about 35% to about 100% Sp, about 40% to about 100% Sp, about 45% to about 100% Sp, about 50% to about 100% Sp, about 55% to about 100% Sp, about 60% to about 100% Sp, about 65% to about 100% Sp, about 70% to about 100% Sp, about 75% to about 100% Sp, about 80% to about 100% Sp, about 85% to about 100% Sp, about 90% to about 100% Sp, or about 95% to about 100% Sp, about 20% to about 80% Sp, about 25% to about 75% Sp, about 30% to about 70% Sp, about 40% to about 60% Sp, or about 45% to about 55% Sp, with the remainder Rp.

[0150] Any of the ASOs described herein may contain a sugar moiety that comprises ribose or deoxyribose, as present in naturally occurring nucleotides, or a modified sugar moiety or sugar analog, including a morpholine ring. Non-limiting examples of modified sugar moieties include 2′ substitutions such as 2′-O-methyl (2′-O-Me), 2′-O-methoxyethyl (2′MOE), 2′-O-aminoethyl, 2′F; N3′->P5′ phosphoramidate, 2′dimethylaminooxyethoxy, 2′dimethylaminoethoxyethoxy, 2′-guanidinidium, 2′-O-guanidinium ethyl, carbamate modified sugars, and bicyclic modified sugars. In some embodiments, the sugar moiety modification is selected from 2′-O-Me, 2′F, and 2′MOE. In some embodiments, the sugar moiety modification is an extra bridge bond, such as in a locked nucleic acid (LNA). In some embodiments the sugar analog contains a morpholine ring, such as phosphorodiamidate morpholino (PMO). In some embodiments, the sugar moiety comprises a ribofuransyl or 2′deoxyribofuransyl modification. In some embodiments, the sugar moiety comprises 2′4′-constrained 2′O-methyloxyethyl (cMOE) modifications. In some embodiments, the sugar moiety comprises cEt 2′,4′ constrained 2′-O ethyl BNA modifications. In some embodiments, the sugar moiety comprises tricycloDNA (tcDNA) modifications. In some embodiments, the sugar moiety comprises ethylene nucleic acid (ENA) modifications. In some embodiments, the sugar moiety comprises MCE modifications. Modifications are known in the art and described in the literature, e.g., by Jarver, et al., 2014, “A Chemical View of Oligonucleotides for Exon Skipping and Related Drug Applications,” Nucleic Acid Therapeutics 24(1): 37-47, incorporated by reference for this purpose herein.

[0151] In some examples, each monomer of the ASO is modified in the same way, for example each linkage of the backbone of the ASO comprises a phosphorothioate linkage or each ribose sugar moiety comprises a 2′O-methyl modification. Such modifications that are present on each of the monomer components of an ASO are referred to as “uniform modifications.” In some examples, a combination of different modifications may be desired, for example, an ASO may comprise a combination of phosphorodiamidate linkages and sugar moieties comprising morpholine rings (morpholinos). Combinations of different modifications to an ASO are referred to as “mixed modifications” or “mixed chemistries.”

[0152] In some embodiments, the ASO comprises one or more backbone modification. In some embodiments, the ASO comprises one or more sugar moiety modification. In some embodiments, the ASO comprises one or more backbone modification and one or more sugar moiety modification. In some embodiments, the ASO comprises 2′MOE modifications and a phosphorothioate backbone. In some embodiments, the ASO comprises a phosphorodiamidate morpholino (PMO). In some embodiments, the ASO comprises a peptide nucleic acid (PNA). Any of the ASOs or any component of an ASO (e.g., a nucleobase, sugar moiety, backbone) described herein may be modified in order to achieve desired properties or activities of the ASO or reduce undesired properties or activities of the ASO. For example, an ASO or one or more component of any ASO may be modified to enhance binding affinity to a target sequence on a pre-mRNA transcript; reduce binding to any non-target sequence; reduce degradation by cellular nucleases (i.e., RNase H); improve uptake of the ASO into a cell and/or into the nucleus of a cell; alter the pharmacokinetics or pharmacodynamics of the ASO; and modulate the half-life of the ASO.

[0153] In some embodiments, the ASOs are comprised of 2′-O-(2-methoxyethyl) (MOE) phosphorothioate-modified nucleotides. ASOs comprised of such nucleotides are especially well-suited to the methods disclosed herein; oligomers having such modifications have been shown to have significantly enhanced resistance to nuclease degradation and increased bioavailability, making them suitable, for example, for oral delivery in some embodiments described herein. See e.g., Geary, et al., J Pharmacol Exp Ther. 2001; 296(3):890-7; Geary, et al., J Pharmacol Exp Ther. 2001; 296(3):898-904.

[0154] Methods of synthesizing ASOs will be known to one of skill in the art. Alternatively or in addition, ASOs may be obtained from a commercial source.

[0155] Unless specified otherwise, the left-hand end of single-stranded nucleic acid (e.g., pre-mRNA transcript, oligonucleotide, ASO, etc.) sequences is the 5′ end and the left-hand direction of single or double-stranded nucleic acid sequences is referred to as the 5′ direction. Similarly, the right-hand end or direction of a nucleic acid sequence (single or double stranded) is the 3′ end or direction. Generally, a region or sequence that is 5′ to a reference point in a nucleic acid is referred to as “upstream,” and a region or sequence that is 3′ to a reference point in a nucleic acid is referred to as “downstream.” Generally, the 5′ direction or end of an mRNA is where the initiation or start codon is located, while the 3′ end or direction is where the termination codon is located. In some aspects, nucleotides that are upstream of a reference point in a nucleic acid may be designated by a negative number, while nucleotides that are downstream of a reference point may be designated by a positive number. For example, a reference point (e.g., an exon-exon junction in mRNA) may be designated as the “zero” site, and a nucleotide that is directly adjacent and upstream of the reference point is designated “minus one,” e.g., “−1,” while a nucleotide that is directly adjacent and downstream of the reference point is designated “plus one,” e.g., “+1.”

[0156] In some embodiments, the ASOs are complementary to (and bind to) a targeted portion of a SCN1A RIC pre-mRNA that is downstream (in the 3′ direction) of the 5′ splice site of the retained intron in a SCN1A RIC pre-mRNA (e.g., the direction designated by positive numbers relative to the 5′ splice site) (FIG. 1). In some embodiments, the ASOs are complementary to a targeted portion of the SCN1A RIC pre-mRNA that is within the region about +6 to about +500 relative to the 5′ splice site of the retained intron. In some embodiments, the ASO is not complementary to nucleotides +1 to +5 relative to the 5′ splice site (the first five nucleotides located downstream of the 5′ splice site). In some embodiments, the ASOs may be complementary to a targeted portion of a SCN1A RIC pre-mRNA that is within the region between nucleotides +6 and +496 relative to the 5′ splice site of the retained intron. In some aspects, the ASOs are complementary to a targeted portion that is within the region about +6 to about +500, about +6 to about +490, about +6 to about +480, about +6 to about +470, about +6 to about +460, about +6 to about +450, about +6 to about +440, about +6 to about +430, about +6 to about +420, about +6 to about +410, about +6 to about +400, about +6 to about +390, about +6 to about +380, about +6 to about +370, about +6 to about +360, about +6 to about +350, about +6 to about +340, about +6 to about +330, about +6 to about +320, about +6 to about +310, about +6 to about +300, about +6 to about +290, about +6 to about +280, about +6 to about +270, about +6 to about +260, about +6 to about +250, about +6 to about +240, about +6 to about +230, about +6 to about +220, about +6 to about +210, about +6 to about +200, about +6 to about +190, about +6 to about +180, about +6 to about +170, about +6 to about +160, about +6 to about +150, about +6 to about +140, about +6 to about +130, about +6 to about +120, about +6 to about +110, about +6 to about +100, about +6 to about +90, about +6 to about +80, about +6 to about +70, about +6 to about +60, about +6 to about +50, about +6 to about +40, about +6 to about +30, or about +6 to about +20 relative to 5′ splice site of the retained intron.

[0157] In some embodiments, the ASOs are complementary to (and bind to) a targeted portion of a SCN1A RIC pre-mRNA that is upstream (in the 5′ direction) of the 5′ splice site of the retained intron in a SCN1A RIC pre-mRNA (e.g., the direction designated by negative numbers relative to the 5′ splice site) (FIG. 1). In some embodiments, the ASOs are complementary to a targeted portion of the SCN1A RIC pre-mRNA that is within the region about −4e to about −270e relative to the 5′ splice site of the retained intron. In some embodiments, the ASO is not complementary to nucleotides −1e to −3e relative to the 5′ splice site (the first three nucleotides located upstream of the 5′ splice site). In some embodiments, the ASOs may be complementary to a targeted portion of a SCN1A RIC pre-mRNA that is within the region between nucleotides −4e and −264e relative to the 5′ splice site of the retained intron. In some aspects, the ASOs are complementary to a targeted portion that is within the region about −4e to about −270e, about −4e to about −260e, about −4e to about −250e, about −4e to about −240e, about −4e to about −230e, about −4e to about −220e, about −4e to about −210e, about −4e to about −200e, about −4e to about −190e, about −4e to about −180e, about −4e to about −170e, about −4e to about −160e, about −4e to about −150e, about −4e to about −140e, about −4e to about −130e, about −4e to about −120e, about −4e to about −110e, about −4e to about −100e, about −4e to about −90e, about −4e to about −80e, about −4e to about −70e, about −4e to about −60e, about −4e to about −50e, about −4e to about −40e, about −4e to about −30e, or about −4e to about −20e relative to 5′ splice site of the retained intron.

[0158] In some embodiments, the ASOs are complementary to a targeted region of a SCN1A RIC pre-mRNA that is upstream (in the 5′ direction) of the 3′ splice site of the retained intron in a SCN1A RIC pre-mRNA (e.g., in the direction designated by negative numbers) (FIG. 1). In some embodiments, the ASOs are complementary to a targeted portion of the SCN1A RIC pre-mRNA that is within the region about −16 to about −500 relative to the 3′ splice site of the retained intron. In some embodiments, the ASO is not complementary to nucleotides −1 to −15 relative to the 3′ splice site (the first 15 nucleotides located upstream of the 3′ splice site). In some embodiments, the ASOs are complementary to a targeted portion of the SCN1A RIC pre-mRNA that is within the region −16 to −496 relative to the 3′ splice site of the retained intron. In some aspects, the ASOs are complementary to a targeted portion that is within the region about −16 to about −500, about −16 to about −490, about −16 to about −480, about −16 to about −470, about −16 to about −460, about −16 to about −450, about −16 to about −440, about −16 to about −430, about −16 to about −420, about −16 to about −410, about −16 to about −400, about −16 to about −390, about −16 to about −380, about −16 to about −370, about −16 to about −360, about −16 to about −350, about −16 to about −340, about −16 to about −330, about −16 to about −320, about −16 to about −310, about −16 to about −300, about −16 to about −290, about −16 to about −280, about −16 to about −270, about −16 to about −260, about −16 to about −250, about −16 to about −240, about −16 to about −230, about −16 to about −220, about −16 to about −210, about −16 to about −200, about −16 to about −190, about −16 to about −180, about −16 to about −170, about −16 to about −160, about −16 to about −150, about −16 to about −140, about −16 to about −130, about −16 to about −120, about −16 to about −110, about −16 to about −100, about −16 to about −90, about −16 to about −80, about −16 to about −70, about −16 to about −60, about −16 to about −50, about −16 to about −40, or about −16 to about −30 relative to 3′ splice site of the retained intron.

[0159] In some embodiments, the ASOs are complementary to a targeted region of a SCN1A RIC pre-mRNA that is downstream (in the 3′ direction) of the 3′ splice site of the retained intron in a SCN1A RIC pre-mRNA (e.g., in the direction designated by positive numbers) (FIG. 1). In some embodiments, the ASOs are complementary to a targeted portion of the SCN1A RIC pre-mRNA that is within the region of about +2e to about +40e relative to the 3′ splice site of the retained intron. In some embodiments, the ASO is not complementary to nucleotides +1e relative to the 3′ splice site (the first nucleotide located downstream of the 3′ splice site). In some embodiments, the ASOs may be complementary to a targeted portion of a SCN1A RIC pre-mRNA that is within the region between nucleotides +2e and +37e relative to the 3′ splice site of the retained intron. In some aspects, the ASOs are complementary to a targeted portion that is within the region about +2e to about +40e, about +2e to about +30e, about +2e to about +20e, or about +2e to about +10e relative to 3′ splice site of the retained intron.

[0160] In some embodiments, the ASOs are complementary to (and bind to) a targeted portion of a SYNGAP1 RIC pre-mRNA that is downstream (in the 3′ direction) of the 5′ splice site of the retained intron in a SYNGAP1 RIC pre-mRNA (e.g., the direction designated by positive numbers relative to the 5′ splice site) (FIG. 1). In some embodiments, the ASOs are complementary to a targeted portion of the SYNGAP1 RIC pre-mRNA that is within the region about +6 to about +500 relative to the 5′ splice site of the retained intron. In some embodiments, the ASO is not complementary to nucleotides +1 to +5 relative to the 5′ splice site (the first five nucleotides located downstream of the 5′ splice site). In some embodiments, the ASOs may be complementary to a targeted portion of a SYNGAP1 RIC pre-mRNA that is within the region between nucleotides +6 and +496 relative to the 5′ splice site of the retained intron. In some embodiments, the ASOs may be complementary to a targeted portion of a SYNGAP1 RIC pre-mRNA that is within the region between nucleotides +6 and +251 relative to the 5′ splice site of the retained intron. In some aspects, the ASOs are complementary to a targeted portion that is within the region about +6 to about +500, about +6 to about +490, about +6 to about +480, about +6 to about +470, about +6 to about +460, about +6 to about +450, about +6 to about +440, about +6 to about +430, about +6 to about +420, about +6 to about +410, about +6 to about +400, about +6 to about +390, about +6 to about +380, about +6 to about +370, about +6 to about +360, about +6 to about +350, about +6 to about +340, about +6 to about +330, about +6 to about +320, about +6 to about +310, about +6 to about +300, about +6 to about +290, about +6 to about +280, about +6 to about +270, about +6 to about +260, about +6 to about +250, about +6 to about +240, about +6 to about +230, about +6 to about +220, about +6 to about +210, about +6 to about +200, about +6 to about +190, about +6 to about +180, about +6 to about +170, about +6 to about +160, about +6 to about +150, about +6 to about +140, about +6 to about +130, about +6 to about +120, about +6 to about +110, about +6 to about +100, about +6 to about +90, about +6 to about +80, about +6 to about +70, about +6 to about +60, about +6 to about +50, about +6 to about +40, about +6 to about +30, or about +6 to about +20 relative to 5′ splice site of the retained intron.

[0161] In some embodiments, the ASOs are complementary to (and bind to) a targeted portion of a SYNGAP1 RIC pre-mRNA that is upstream (in the 5′ direction) of the 5′ splice site of the retained intron in a SYNGAP1 RIC pre-mRNA (e.g., the direction designated by negative numbers relative to the 5′ splice site) (FIG. 1). In some embodiments, the ASOs are complementary to a targeted portion of the SYNGAP1 RIC pre-mRNA that is within the region about −4e to about −1,060e relative to the 5′ splice site of the retained intron. In some embodiments, the ASO is not complementary to nucleotides −1e to −3e relative to the 5′ splice site (the first three nucleotides located upstream of the 5′ splice site). In some embodiments, the ASOs may be complementary to a targeted portion of a SYNGAP1 RIC pre-mRNA that is within the region between nucleotides −4e and −1054e relative to the 5′ splice site of the retained intron. In some embodiments, the ASOs may be complementary to a targeted portion of a SYNGAP1 RIC pre-mRNA that is within the region between nucleotides −4e and −73e relative to the 5′ splice site of the retained intron. In some aspects, the ASOs are complementary to a targeted portion that is within the region about −4e to about −1,060e, about −4e to about −1,050e, about −4e to about −1,040e, about −4e to about −1,030e, about −4e to about −1,020e, about −4e to about −1,010e, about −4e to about −1,000e, about −4e to about −990e, about −4e to about −980e, about −4e to about −970e, about −4e to about −960e, about −4e to about −950e, about −4e to about −940e, about −4e to about −930e, about −4e to about −920e, about −4e to about −910e, about −4e to about −900e, about −4e to about −890e, about −4e to about −880e, about −4e to about −870e, about −4e to about −860e, about −4e to about −850e, about −4e to about −840e, about −4e to about −830e, about −4e to about −820e, about −4e to about −810e, about −4e to about −800e, about −4e to about −790e, about −4e to about −780e, about −4e to about −770e, about −4e to about −760e, about −4e to about −750e, about −4e to about −740e, about −4e to about −730e, about −4e to about −720e, about −4e to about −710e, about −4e to about −700e, about −4e to about −690e, about −4e to about −680e, about −4e to about −670e, about −4e to about −660e, about −4e to about −650e, about −4e to about −640e, about −4e to about −630e, about −4e to about −620e, about −4e to about −610e, about −4e to about −600e, about −4e to about −590e, about −4e to about −580e, about −4e to about −570e, about −4e to about −560e, about −4e to about −550e, about −4e to about −540e, about −4e to about −530e, about −4e to about −520e, about −4e to about −510e, about −4e to about −500e, about −4e to about −490e, about −4e to about −480e, about −4e to about −470e, about −4e to about −460e, about −4e to about −450e, about −4e to about −440e, about −4e to about −430e, about −4e to about −420e, about −4e to about −410e, about −4e to about −400e, about −4e to about −390e, about −4e to about −380e, about −4e to about −370e, about −4e to about −360e, about −4e to about −350e, about −4e to about −340e, about −4e to about −330e, about −4e to about −320e, about −4e to about −310e, about −4e to about −300e, about −4e to about −290e, about −4e to about −280e, about −4e to about −270e, about −4e to about −260e, about −4e to about −250e, about −4e to about −240e, about −4e to about −230e, about −4e to about −220e, about −4e to about −210e, about −4e to about −200e, about −4e to about −190e, about −4e to about −180e, about −4e to about −170e, about −4e to about −160e, about −4e to about −150e, about −4e to about −140e, about −4e to about −130e, about −4e to about −120e, about −4e to about −110e, about −4e to about −100e, about −4e to about −90e, about −4e to about −80e, about −4e to about −70e, about −4e to about −60e, about −4e to about −50e, about −4e to about −40e, about −4e to about −30e, or about −4e to about −20e relative to 5′ splice site of the retained intron.

[0162] In some embodiments, the ASOs are complementary to a targeted region of a SYNGAP1 RIC pre-mRNA that is upstream (in the 5′ direction) of the 3′ splice site of the retained intron in a SYNGAP1 RIC pre-mRNA (e.g., in the direction designated by negative numbers) (FIG. 1). In some embodiments, the ASOs are complementary to a targeted portion of the SYNGAP1 RIC pre-mRNA that is within the region of about −16 to about −500 relative to the 3′ splice site of the retained intron. In some embodiments, the ASO is not complementary to nucleotides −1 to −15 relative to the 3′ splice site (the first 15 nucleotides located upstream of the 3′ splice site). In some embodiments, the ASOs are complementary to a targeted portion of the SYNGAP1 RIC pre-mRNA that is within the region −16 to −256 relative to the 3′ splice site of the retained intron. In some embodiments, the ASOs are complementary to a targeted portion of the SYNGAP1 RIC pre-mRNA that is within the region −16 to −496 relative to the 3′ splice site of the retained intron. In some aspects, the ASOs are complementary to a targeted portion that is within the region about −16 to about −500, about −16 to about −490, about −16 to about −480, about −16 to about −470, about −16 to about −460, about −16 to about −450, about −16 to about −440, about −16 to about −430, about −16 to about −420, about −16 to about −410, about −16 to about −400, about −16 to about −390, about −16 to about −380, about −16 to about −370, about −16 to about −360, about −16 to about −350, about −16 to about −340, about −16 to about −330, about −16 to about −320, about −16 to about −310, about −16 to about −300, about −16 to about −290, about −16 to about −280, about −16 to about −270, about −16 to about −260, about −16 to about −250, about −16 to about −240, about −16 to about −230, about −16 to about −220, about −16 to about −210, about −16 to about −200, about −16 to about −190, about −16 to about −180, about −16 to about −170, about −16 to about −160, about −16 to about −150, about −16 to about −140, about −16 to about −130, about −16 to about −120, about −16 to about −110, about −16 to about −100, about −16 to about −90, about −16 to about −80, about −16 to about −70, about −16 to about −60, about −16 to about −50, about −16 to about −40, or about −16 to about −30 relative to 3′ splice site of the retained intron.

[0163] In some embodiments, the ASOs are complementary to a targeted region of a SYNGAP1 RIC pre-mRNA that is downstream (in the 3′ direction) of the 3′ splice site of the retained intron in a SYNGAP1 RIC pre-mRNA (e.g., in the direction designated by positive numbers) (FIG. 1). In some embodiments, the ASOs are complementary to a targeted portion of the SYNGAP1 RIC pre-mRNA that is within the region of about +2e to about +1,920e relative to the 3′ splice site of the retained intron. In some embodiments, the ASO is not complementary to nucleotides +1e relative to the 3′ splice site (the first nucleotide located downstream of the 3′ splice site). In some embodiments, the ASO is not complementary to nucleotides +16e relative to the 3′ splice site (the first sixteen nucleotides located downstream of the 3′ splice site). In some embodiments, the ASOs may be complementary to a targeted portion of a SYNGAP1 RIC pre-mRNA that is within the region between nucleotides +2e and +157e relative to the 3′ splice site of the retained intron. In some embodiments, the ASOs may be complementary to a targeted portion of a SYNGAP1 RIC pre-mRNA that is within the region between nucleotides +2e and +1,912e relative to the 3′ splice site of the retained intron. In some aspects, the ASOs are complementary to a targeted portion that is within the region about +2e to about +1,920e, about +2e to about +1,910e, about +2e to about +1,900e, about +2e to about +1,890e, about +2e to about +1,880e, about +2e to about +1,870e, about +2e to about +1,860e, about +2e to about +1,850e, about +2e to about +1,840e, about +2e to about +1,830e, about +2e to about +1,820e, about +2e to about +1,810e, about +2e to about +1,800e, about +2e to about +1,790e, about +2e to about +1,780e, about +2e to about +1,770e, about +2e to about +1,760e, about +2e to about +1,750e, about +2e to about +1,740e, about +2e to about +1,730e, about +2e to about +1,720e, about +2e to about +1,710e, about +2e to about +1,700e, about +2e to about +1,690e, about +2e to about +1,680e, about +2e to about +1,670e, about +2e to about +1,660e, about +2e to about +1,650e, about +2e to about +1,640e, about +2e to about +1,630e, about +2e to about +1,620e, about +2e to about +1,610e, about +2e to about +1,600e, about +2e to about +1,590e, about +2e to about +1,580e, about +2e to about +1,570e, about +2e to about +1,560e, about +2e to about +1,550e, about +2e to about +1,540e, about +2e to about +1,530e, about +2e to about +1,520e, about +2e to about +1,510e, about +2e to about +1,500e, about +2e to about +1,490e, about +2e to about +1,480e, about +2e to about +1,470e, about +2e to about +1,460e, about +2e to about +1,450e, about +2e to about +1,440e, about +2e to about +1,430e, about +2e to about +1,420e, about +2e to about +1,410e, about +2e to about +1,400e, about +2e to about +1,390e, about +2e to about +1,380e, about +2e to about +1,370e, about +2e to about +1,360e, about +2e to about +1,350e, about +2e to about +1,340e, about +2e to about +1,330e, about +2e to about +1,320e, about +2e to about +1,310e, about +2e to about +1,300e, about +2e to about +1,290e, about +2e to about +1,280e, about +2e to about +1,270e, about +2e to about +1,260e, about +2e to about +1,250e, about +2e to about +1,240e, about +2e to about +1,230e, about +2e to about +1,220e, about +2e to about +1,210e, about +2e to about +1,200e, about +2e to about +1,190e, about +2e to about +1,180e, about +2e to about +1,170e, about +2e to about +1,160e, about +2e to about +1,150e, about +2e to about +1,140e, about +2e to about +1,130e, about +2e to about +1,120e, about +2e to about +1,110e, about +2e to about +1,100e, about +2e to about +1,090e, about +2e to about +1,080e, about +2e to about +1,070e, about +2e to about +1,060e, about +2e to about +1,050e, about +2e to about +1,040e, about +2e to about +1,030e, about +2e to about +1,020e, about +2e to about +1,010e, about +2e to about +1,000e, about +2e to about +990e, about +2e to about +980e, about +2e to about +970e, about +2e to about +960e, about +2e to about +950e, about +2e to about +940e, about +2e to about +930e, about +2e to about +920e, about +2e to about +910e, about +2e to about +900e, about +2e to about +890e, about +2e to about +880e, about +2e to about +870e, about +2e to about +860e, about +2e to about +850e, about +2e to about +840e, about +2e to about +830e, about +2e to about +820e, about +2e to about +810e, about +2e to about +800e, about +2e to about +790e, about +2e to about +780e, about +2e to about +770e, about +2e to about +760e, about +2e to about +750e, about +2e to about +740e, about +2e to about +730e, about +2e to about +720e, about +2e to about +710e, about +2e to about +700e, about +2e to about +690e, about +2e to about +680e, about +2e to about +670e, about +2e to about +660e, about +2e to about +650e, about +2e to about +640e, about +2e to about +630e, about +2e to about +620e, about +2e to about +610e, about +2e to about +600e, about +2e to about +590e, about +2e to about +580e, about +2e to about +570e, about +2e to about +560e, about +2e to about +550e, about +2e to about +540e, about +2e to about +530e, about +2e to about +520e, about +2e to about +510e, about +2e to about +500e, about +2e to about +490e, about +2e to about +480e, about +2e to about +470e, about +2e to about +460e, about +2e to about +450e, about +2e to about +440e, about +2e to about +430e, about +2e to about +420e, about +2e to about +410e, about +2e to about +400e, about +2e to about +390e, about +2e to about +380e, about +2e to about +370e, about +2e to about +360e, about +2e to about +350e, about +2e to about +340e, about +2e to about +330e, about +2e to about +320e, about +2e to about +310e, about +2e to about +300e, about +2e to about +290e, about +2e to about +280e, about +2e to about +270e, about +2e to about +260e, about +2e to about +250e, about +2e to about +240e, about +2e to about +230e, about +2e to about +220e, about +2e to about +210e, about +2e to about +200e, about +2e to about +190e, about +2e to about +180e, about +2e to about +170e, about +2e to about +160e, about +2e to about +150e, about +2e to about +140e, about +2e to about +130e, about +2e to about +120e, about +2e to about +110e, about +2e to about +100e, about +2e to about +90e, about +2e to about +80e, about +2e to about +70e, about +2e to about +60e, about +2e to about +50e, about +2e to about +40e, about +2e to about +30e, or about +2e to about +20e relative to 3′ splice site of the retained intron.

[0164] In embodiments, the targeted portion of the SYNGAP1 or SCN1A RIC pre-mRNA is within the region +100 relative to the 5′ splice site of the retained intron to −100 relative to the 3′ splice site of the retained intron.

[0165] The ASOs may be of any length suitable for specific binding and effective enhancement of splicing. In some embodiments, the ASOs consist of 8 to 50 nucleobases. For example, the ASO may be 8, 9, 10, 11, 12, 13, 14, 15, 16, 17, 18, 19, 20, 21, 22, 23, 24, 25, 26, 27, 28, 29, 30, 31, 32, 33, 34, 35, 40, 45, or 50 nucleobases in length. In some embodiments, the ASOs consist of more than 50 nucleobases. In some embodiments, the ASO is from 8 to 50 nucleobases, 8 to 40 nucleobases, 8 to 35 nucleobases, 8 to 30 nucleobases, 8 to 25 nucleobases, 8 to 20 nucleobases, 8 to 15 nucleobases, 9 to 50 nucleobases, 9 to 40 nucleobases, 9 to 35 nucleobases, 9 to 30 nucleobases, 9 to 25 nucleobases, 9 to 20 nucleobases, 9 to 15 nucleobases, 10 to 50 nucleobases, 10 to 40 nucleobases, 10 to 35 nucleobases, 10 to 30 nucleobases, 10 to 25 nucleobases, 10 to 20 nucleobases, 10 to 15 nucleobases, 11 to 50 nucleobases, 11 to 40 nucleobases, 11 to 35 nucleobases, 11 to 30 nucleobases, 11 to 25 nucleobases, 11 to 20 nucleobases, 11 to 15 nucleobases, 12 to 50 nucleobases, 12 to 40 nucleobases, 12 to 35 nucleobases, 12 to 30 nucleobases, 12 to 25 nucleobases, 12 to 20 nucleobases, 12 to 15 nucleobases, 13 to 50 nucleobases, 13 to 40 nucleobases, 13 to 35 nucleobases, 13 to 30 nucleobases, 13 to 25 nucleobases, 13 to 20 nucleobases, 14 to 50 nucleobases, 14 to 40 nucleobases, 14 to 35 nucleobases, 14 to 30 nucleobases, 14 to 25 nucleobases, 14 to 20 nucleobases, 15 to 50 nucleobases, 15 to 40 nucleobases, 15 to 35 nucleobases, 15 to 30 nucleobases, 15 to 25 nucleobases, 15 to 20 nucleobases, 20 to 50 nucleobases, 20 to 40 nucleobases, 20 to 35 nucleobases, 20 to 30 nucleobases, 20 to 25 nucleobases, 25 to 50 nucleobases, 25 to 40 nucleobases, 25 to 35 nucleobases, or 25 to 30 nucleobases in length. In some embodiments, the ASOs are 18 nucleotides in length. In some embodiments, the ASOs are 15 nucleotides in length. In some embodiments, the ASOs are 25 nucleotides in length.

[0166] In some embodiments, two or more ASOs with different chemistries but complementary to the same targeted portion of the RIC pre-mRNA are used. In some embodiments, two or more ASOs that are complementary to different targeted portions of the RIC pre-mRNA are used.

[0167] In embodiments, the antisense oligonucleotides of the invention are chemically linked to one or more moieties or conjugates, e.g., a targeting moiety or other conjugate that enhances the activity or cellular uptake of the oligonucleotide. Such moieties include, but are not limited to, a lipid moiety, e.g., as a cholesterol moiety, a cholesteryl moiety, an aliphatic chain, e.g., dodecandiol or undecyl residues, a polyamine or a polyethylene glycol chain, or adamantane acetic acid. Oligonucleotides comprising lipophilic moieties and preparation methods have been described in the published literature. In embodiments, the antisense oligonucleotide is conjugated with a moiety including, but not limited to, an abasic nucleotide, a polyether, a polyamine, a polyamide, a peptides, a carbohydrate, e.g., N-acetylgalactosamine (GalNAc), N-Ac-Glucosamine (GluNAc), or mannose (e.g., mannose-6-phosphate), a lipid, or a polyhydrocarbon compound. Conjugates can be linked to one or more of any nucleotides comprising the antisense oligonucleotide at any of several positions on the sugar, base or phosphate group, as understood in the art and described in the literature, e.g., using a linker. Linkers can include a bivalent or trivalent branched linker. In embodiments, the conjugate is attached to the 3′ end of the antisense oligonucleotide. Methods of preparing oligonucleotide conjugates are described, e.g., in U.S. Pat. No. 8,450,467, “Carbohydrate conjugates as delivery agents for oligonucleotides,” incorporated by reference herein.

[0168] In some embodiments, the nucleic acid to be targeted by an ASO is a SYNGAP1 or SCN1A RIC pre-mRNA expressed in a cell, such as a eukaryotic cell. In some embodiments, the term “cell” may refer to a population of cells. In some embodiments, the cell is in a subject. In some embodiments, the cell is isolated from a subject. In some embodiments, the cell is ex vivo. In some embodiments, the cell is a condition or disease-relevant cell or a cell line. In some embodiments, the cell is in vitro (e.g., in cell culture).

### Pharmaceutical Compositions

[0169] Pharmaceutical compositions or formulations comprising the antisense oligonucleotide of the described compositions and for use in any of the described methods can be prepared according to conventional techniques well known in the pharmaceutical industry and described in the published literature. In embodiments, a pharmaceutical composition or formulation for treating a subject comprises an effective amount of any antisense oligomer as described above, or a pharmaceutically acceptable salt, solvate, hydrate or ester thereof, and a pharmaceutically acceptable diluent. The antisense oligomer of a pharmaceutical formulation may further comprise a pharmaceutically acceptable excipient, diluent or carrier.

[0170] Pharmaceutically acceptable salts are suitable for use in contact with the tissues of humans and lower animals without undue toxicity, irritation, allergic response, etc., and are commensurate with a reasonable benefit/risk ratio. (See, e.g., S. M. Berge, et al., J. Pharmaceutical Sciences, 66: 1-19 (1977), incorporated herein by reference for this purpose. The salts can be prepared in situ during the final isolation and purification of the compounds, or separately by reacting the free base function with a suitable organic acid. Examples of pharmaceutically acceptable, nontoxic acid addition salts are salts of an amino group formed with inorganic acids such as hydrochloric acid, hydrobromic acid, phosphoric acid, sulfuric acid and perchloric acid or with organic acids such as acetic acid, oxalic acid, maleic acid, tartaric acid, citric acid, succinic acid or malonic acid or by using other documented methodologies such as ion exchange. Other pharmaceutically acceptable salts include adipate, alginate, ascorbate, aspartate, benzenesulfonate, benzoate, bisulfate, borate, butyrate, camphorate, camphorsulfonate, citrate, cyclopentanepropionate, digluconate, dodecylsulfate, ethanesulfonate, formate, fumarate, glucoheptonate, glycerophosphate, gluconate, hemisulfate, heptanoate, hexanoate, hydroiodide, 2-hydroxy-ethanesulfonate, lactobionate, lactate, laurate, lauryl sulfate, malate, maleate, malonate, methanesulfonate, 2-naphthalenesulfonate, nicotinate, nitrate, oleate, oxalate, palmitate, pamoate, pectinate, persulfate, 3-phenylpropionate, phosphate, picrate, pivalate, propionate, stearate, succinate, sulfate, tartrate, thiocyanate, p-toluenesulfonate, undecanoate, valerate salts, and the like. Representative alkali or alkaline earth metal salts include sodium, lithium, potassium, calcium, magnesium, and the like. Further pharmaceutically acceptable salts include, when appropriate, nontoxic ammonium, quaternary ammonium, and amine cations formed using counterions such as halide, hydroxide, carboxylate, sulfate, phosphate, nitrate, loweralkyl sulfonate and aryl sulfonate.

[0171] In embodiments, the compositions are formulated into any of many possible dosage forms such as, but not limited to, tablets, capsules, gel capsules, liquid syrups, soft gels, suppositories, and enemas. In embodiments, the compositions are formulated as suspensions in aqueous, non-aqueous or mixed media. Aqueous suspensions may further contain substances that increase the viscosity of the suspension including, for example, sodium carboxymethylcellulose, sorbitol and/or dextran. The suspension may also contain stabilizers. In embodiments, a pharmaceutical formulation or composition of the present invention includes, but is not limited to, a solution, emulsion, microemulsion, foam or liposome-containing formulation (e.g., cationic or noncationic liposomes).

[0172] The pharmaceutical composition or formulation of the present invention may comprise one or more penetration enhancer, carrier, excipients or other active or inactive ingredients as appropriate and well known to those of skill in the art or described in the published literature. In embodiments, liposomes also include sterically stabilized liposomes, e.g., liposomes comprising one or more specialized lipids. These specialized lipids result in liposomes with enhanced circulation lifetimes. In embodiments, a sterically stabilized liposome comprises one or more glycolipids or is derivatized with one or more hydrophilic polymers, such as a polyethylene glycol (PEG) moiety. In embodiments, a surfactant is included in the pharmaceutical formulation or compositions. The use of surfactants in drug products, formulations and emulsions is well known in the art. In embodiments, the present invention employs a penetration enhancer to effect the efficient delivery of the antisense oligonucleotide, e.g., to aid diffusion across cell membranes and/or enhance the permeability of a lipophilic drug. In embodiments, the penetration enhancers are a surfactant, fatty acid, bile salt, chelating agent, or non-chelating nonsurfactant.

[0173] In embodiments, the pharmaceutical formulation comprises multiple antisense oligonucleotides. In embodiments, the antisense oligonucleotide is administered in combination with another drug or therapeutic agent.

### Treatment of Subjects

[0174] Any of the compositions provided herein may be administered to an individual. “Individual” may be used interchangeably with “subject” or “patient.” An individual may be a mammal, for example a human or animal such as a non-human primate, a rodent, a rabbit, a rat, a mouse, a horse, a donkey, a goat, a cat, a dog, a cow, a pig, or a sheep. In embodiments, the individual is a human. In embodiments, the individual is a fetus, an embryo, or a child. In other embodiments, the individual may be another eukaryotic organism, such as a plant. In some embodiments, the compositions provided herein are administered to a cell ex vivo.

[0175] In some embodiments, the compositions provided herein are administered to an individual as a method of treating a disease or disorder. In some embodiments, the individual has a genetic disease, such as any of the diseases described herein. In some embodiments, the individual is at risk of having the disease, such as any of the diseases described herein. In some embodiments, the individual is at increased risk of having a disease or disorder caused by insufficient amount of a protein or insufficient activity of a protein. If an individual is “at an increased risk” of having a disease or disorder caused insufficient amount of a protein or insufficient activity of a protein, the method involves preventative or prophylactic treatment. For example, an individual may be at an increased risk of having such a disease or disorder because of family history of the disease. Typically, individuals at an increased risk of having such a disease or disorder benefit from prophylactic treatment (e.g., by preventing or delaying the onset or progression of the disease or disorder). In embodiments, a fetus is treated in utero, e.g., by administering the ASO composition to the fetus directly or indirectly (e.g., via the mother).

[0176] Suitable routes for administration of ASOs of the present invention may vary depending on cell type to which delivery of the ASOs is desired. Multiple tissues and organs are affected by AD mental retardation 5 and Dravet syndrome, with the brain being the most significantly affected tissue. The ASOs of the present invention may be administered to patients parenterally, for example, by intrathecal injection, intracerebroventricular injection, intraperitoneal injection, intramuscular injection, subcutaneous injection, or intravenous injection.

[0177] In embodiments, the antisense oligonucleotide is administered with one or more agents capable of promoting penetration of the subject antisense oligonucleotide across the blood-brain barrier by any method known in the art. For example, delivery of agents by administration of an adenovirus vector to motor neurons in muscle tissue is described in U.S. Pat. No. 6,632,427, “Adenoviral-vector-mediated gene transfer into medullary motor neurons,” incorporated herein by reference. Delivery of vectors directly to the brain, e.g., the striatum, the thalamus, the hippocampus, or the substantia nigra, is described, e.g., in U.S. Pat. No. 6,756,523, “Adenovirus vectors for the transfer of foreign genes into cells of the central nervous system particularly in brain,” incorporated herein by reference.

[0178] In embodiments, the antisense oligonucleotides are linked or conjugated with agents that provide desirable pharmaceutical or pharmacodynamic properties. In embodiments, the antisense oligonucleotide is coupled to a substance, known in the art to promote penetration or transport across the blood-brain barrier, e.g., an antibody to the transferrin receptor. In embodiments, the antisense oligonucleotide is linked with a viral vector, e.g., to render the antisense compound more effective or increase transport across the blood-brain barrier. In embodiments, osmotic blood brain barrier disruption is assisted by infusion of sugars, e.g., meso erythritol, xylitol, D(+) galactose, D(+) lactose, D(+) xylose, dulcitol, myo-inositol, L(−) fructose, D(−) mannitol, D(+) glucose, D(+) arabinose, D(−) arabinose, cellobiose, D(+) maltose, D(+) raffinose, L(+) rhamnose, D(+) melibiose, D(−) ribose, adonitol, D(+) arabitol, L(−) arabitol, D(+) fucose, L(−) fucose, D(−) lyxose, L(+) lyxose, and L(−) lyxose, or amino acids, e.g., glutamine, lysine, arginine, asparagine, aspartic acid, cysteine, glutamic acid, glycine, histidine, leucine, methionine, phenylalanine, proline, serine, threonine, tyrosine, valine, and taurine. Methods and materials for enhancing blood brain barrier penetration are described, e.g., in U.S. Pat. No. 9,193,969, “Compositions and methods for selective delivery of oligonucleotide molecules to specific neuron types,” U.S. Pat. No. 4,866,042, “Method for the delivery of genetic material across the blood brain barrier,” U.S. Pat. No. 6,294,520, “Material for passage through the blood-brain barrier,” and U.S. Pat. No. 6,936,589, “Parenteral delivery systems,” each incorporated herein by reference.

[0179] In embodiments, an ASO of the invention is coupled to a dopamine reuptake inhibitor (DRI), a selective serotonin reuptake inhibitor (SSRI), a noradrenaline reuptake inhibitor (NRI), a norepinephrine-dopamine reuptake inhibitor (NDRI), and a serotonin-norepinephrine-dopamine reuptake inhibitor (SNDRI), using methods described in, e.g., U.S. Pat. No. 9,193,969, incorporated herein by reference.

[0180] In embodiments, subjects treated using the methods and compositions are evaluated for improvement in condition using any methods known and described in the art.

Methods of Identifying Additional ASOs that Enhance Splicing

[0181] Also within the scope of the present invention are methods for identifying (determining) additional ASOs that enhance splicing of a SYNGAP1 or SCN1A RIC pre-mRNA, specifically at the target intron. ASOs that specifically hybridize to different nucleotides within the target region of the pre-mRNA may be screened to identify (determine) ASOs that improve the rate and/or extent of splicing of the target intron. In some embodiments, the ASO may block or interfere with the binding site(s) of a splicing repressor(s)/silencer. Any method known in the art may be used to identify (determine) an ASO that when hybridized to the target region of the intron results in the desired effect (e.g., enhanced splicing, protein or functional RNA production). These methods also can be used for identifying ASOs that enhance splicing of the retained intron by binding to a targeted region in an exon flanking the retained intron, or in a non-retained intron. An example of a method that may be used is provided below.

[0182] A round of screening, referred to as an ASO “walk” may be performed using ASOs that have been designed to hybridize to a target region of a pre-mRNA. For example, the ASOs used in the ASO walk can be tiled every 5 nucleotides from approximately 100 nucleotides upstream of the 5′ splice site of the retained intron (e.g., a portion of sequence of the exon located upstream of the target/retained intron) to approximately 100 nucleotides downstream of the 5′ splice site of the target/retained intron and/or from approximately 100 nucleotides upstream of the 3′ splice site of the retained intron to approximately 100 nucleotides downstream of the 3′ splice site of the target/retained intron (e.g., a portion of sequence of the exon located downstream of the target/retained intron). For example, a first ASO of 15 nucleotides in length may be designed to specifically hybridize to nucleotides +6 to +20 relative to the 5′ splice site of the target/retained intron. A second ASO is designed to specifically hybridize to nucleotides +11 to +25 relative to the 5′ splice site of the target/retained intron. ASOs are designed as such spanning the target region of the pre-mRNA. In embodiments, the ASOs can be tiled more closely, e.g., every 1, 2, 3, or 4 nucleotides. Further, the ASOs can be tiled from 100 nucleotides downstream of the 5′ splice site, to 100 nucleotides upstream of the 3′ splice site. In some embodiments, the ASOs can be tiled from about 1,160 nucleotides upstream of the 5′ splice site, to about 500 nucleotides downstream of the 5′ splice site. In some embodiments, the ASOs can be tiled from about 500 nucleotides upstream of the 3′ splice site, to about 1,920 nucleotides downstream of the 3′ splice site.

[0183] One or more ASOs, or a control ASO (an ASO with a scrambled sequence, sequence that is not expected to hybridize to the target region) are delivered, for example by transfection, into a disease-relevant cell line that expresses the target pre-mRNA (e.g., the RIC pre-mRNA described elsewhere herein). The splicing-inducing effects of each of the ASOs may be assessed by any method known in the art, for example by reverse transcriptase (RT)-PCR using primers that span the splice junction, as described herein (see, e.g., Example 1). A reduction or absence of the RT-PCR product produced using the primers spanning the splice junction in ASO-treated cells as compared to in control ASO-treated cells indicates that splicing of the target intron has been enhanced. In some embodiments, the splicing efficiency, the ratio of spliced to unspliced pre-mRNA, the rate of splicing, or the extent of splicing may be improved using the ASOs described herein. The amount of protein or functional RNA that is encoded by the target pre-mRNA can also be assessed to determine whether each ASO achieved the desired effect (e.g., enhanced protein production). Any method known in the art for assessing and/or quantifying protein production, such as Western blotting, flow cytometry, immunofluorescence microscopy, and ELISA, can be used.

[0184] A second round of screening, referred to as an ASO “micro-walk” may be performed using ASOs that have been designed to hybridize to a target region of a pre-mRNA. The ASOs used in the ASO micro-walk are tiled every 1 nucleotide to further refine the nucleotide acid sequence of the pre-mRNA that when hybridized with an ASO results in enhanced splicing.

[0185] Regions defined by ASOs that promote splicing of the target intron are explored in greater detail by means of an ASO “micro-walk”, involving ASOs spaced in 1-nt steps, as well as longer ASOs, typically 18-25 nt.

[0186] As described for the ASO walk above, the ASO micro-walk is performed by delivering one or more ASOs, or a control ASO (an ASO with a scrambled sequence, sequence that is not expected to hybridize to the target region), for example by transfection, into a disease-relevant cell line that expresses the target pre-mRNA. The splicing-inducing effects of each of the ASOs may be assessed by any method known in the art, for example by reverse transcriptase (RT)-PCR using primers that span the splice junction, as described herein (see, e.g., Example 1). A reduction or absence of the RT-PCR product produced using the primers spanning the splice junction in ASO-treated cells as compared to in control ASO-treated cells indicates that splicing of the target intron has been enhanced. In some embodiments, the splicing efficiency, the ratio of spliced to unspliced pre-mRNA, the rate of splicing, or the extent of splicing may be improved using the ASOs described herein. The amount of protein or functional RNA that is encoded by the target pre-mRNA can also be assessed to determine whether each ASO achieved the desired effect (e.g., enhanced protein production). Any method known in the art for assessing and/or quantifying protein production, such as Western blotting, flow cytometry, immunofluorescence microscopy, and ELISA, can be used.

[0187] ASOs that when hybridized to a region of a pre-mRNA result in enhanced splicing and increased protein production may be tested in vivo using animal models, for example transgenic mouse models in which the full-length human gene has been knocked-in or in humanized mouse models of disease. Suitable routes for administration of ASOs may vary depending on the disease and/or the cell types to which delivery of the ASOs is desired. ASOs may be administered, for example, by intrathecal injection, intracerebroventricular injection, intraperitoneal injection, intramuscular injection, subcutaneous injection, or intravenous injection. Following administration, the cells, tissues, and/or organs of the model animals may be assessed to determine the effect of the ASO treatment by for example evaluating splicing (efficiency, rate, extent) and protein production by methods known in the art and described herein. The animal models may also be any phenotypic or behavioral indication of the disease or disease severity.

[0188] While preferred embodiments of the present invention have been shown and described herein, it will be obvious to those skilled in the art that such embodiments are provided by way of example only. Numerous variations, changes, and substitutions will now occur to those skilled in the art without departing from the invention. It should be understood that various alternatives to the embodiments of the invention described herein may be employed in practicing the invention. It is intended that the following claims define the scope of the invention and that methods and structures within the scope of these claims and their equivalents be covered thereby.

### EXAMPLES

[0189] The present invention will be more specifically illustrated by the following Examples. However, it should be understood that the present invention is not limited by these examples in any manner.

### Example 1: Identification of Intron Retention Events in SYNGAP1 Transcripts by RNAseq Using Next Generation Sequencing

[0190] Whole transcriptome shotgun sequencing was carried out using next generation sequencing to reveal a snapshot of transcripts produced by the SYNGAP1 gene to identify intron-retention events. For this purpose, polyA+ RNA from nuclear and cytoplasmic fractions of HCN (human cortical neurons) was isolated and cDNA libraries constructed using Illumina's TruSeq Stranded mRNA library Prep Kit. The libraries were pair-end sequenced resulting in 100-nucleotide reads that were mapped to the human genome (February 2009, GRCh37/hg19 assembly). The sequencing results for SYNGAP1 are shown in FIG. 3. Briefly, FIG. 3 shows the mapped reads visualized using the UCSC genome browser (operated by the UCSC Genome Informatics Group (Center for Biomolecular Science & Engineering, University of California, Santa Cruz, 1156 High Street, Santa Cruz, Calif. 95064) and described by, e.g., Rosenbloom, et al., 2015, “The UCSC Genome Browser database: 2015 update,” Nucleic Acids Research 43, Database Issue, doi: 10.1093/nar/gku1177) and the coverage and number of reads can be inferred by the peak signals. The height of the peaks indicates the level of expression given by the density of the reads in a particular region. A schematic representation of SYNGAP1 (drawn to scale) is provided by the UCSC genome browser (below the read signals) so that peaks can be matched to SYNGAP1 exonic and intronic regions. Based on this display, we identified three introns (15, 18 and 19 indicated by arrows; corresponding to NM_006772 intron 15, NM_006772 intron 18, and NM_006772 intron 19, respectively) that have high read density in the nuclear fraction of HCN, but have very low to no reads in the cytoplasmic fraction of these cells (as shown for intron 15 in the bottom diagram of FIG. 3 and for introns 18 and 19 in the bottom diagram of FIG. 5). This indicates that these introns are retained and that the intron-15, intron-18, and intron-19 containing transcripts remain in the nucleus, and suggests that these retained SYNGAP1 RIC pre-mRNAs are non-productive, as they are not exported out to the cytoplasm.

### Example 2: Design of ASO-Walk Targeting Intron 15 of SYNGAP1

[0191] An ASO walk was designed to target intron 15 using the method described herein (FIG. 4; Table 1, SEQ ID NOs: 1510 to 1814 and 2287 to 2591). A region immediately upstream and downstream of the intron 15 5′ splice site spanning nucleotides +251 to −1,054e and a region immediately upstream and downstream of intron 15 3′ splice site spanning nucleotides −256 to +157e were utilized to design ASOs to target retained intron 15 SYNGAP1 RIC pre-mRNAs. Table 1 lists exemplary ASOs that were designed and their target sequences. From this design, 2′-O-Me RNA, PS backbone, 18-mer ASOs shifted by 5-nucleotide intervals were produced and utilized to target SYNGAP1 RIC pre-mRNAs to increase SYNGAP1 protein production (see FIG. 4 and FIG. 7B).

TABLE 1
List of ASOs targeting SYNGAP1

| Gene | Pre-mRNA | | Retained | Target Sequence |
|---|---|---|---|---|
| SEQ ID NO: | SEQ ID NO: | ASOs | Intron | SEQ ID NO: |
| SYNGAP1 | SYNGAP1: NM_006772 | SEQ ID NOs: | Intron 18 | SEQ ID NO: |
| SEQ ID NO. 2 | SEQ ID NO. 8 | 1038-1509 | | 2594 |
| | | SEQ ID NOs: | Intron 15 | SEQ ID NO: |
| | | 1510-1814 | | 2592 |
| SYNGAP1 | SYNGAP1: NM_006772 | SEQ ID NOs: | Intron 18 | SEQ ID NO: |
| SEQ ID NO. 3 | SEQ ID NO. 9 | 1815-2286 | | 2595 |
| | | SEQ ID NOs: | Intron 15 | SEQ ID NO: |
| | | 2287-2591 | | 2592 |

### Example 3: Design of ASO-Walk Targeting Intron 18 and 19 of SYNGAP1

[0192] An ASO walk was designed to target introns 18 and 19 using the method described herein (FIG. 6; Table 1, SEQ ID NOs: 1815 to 2286 and 1038 to 1509). A region immediately upstream and downstream of the intron 18 5′ splice site spanning nucleotides +499 to −73e to and a region immediately upstream and downstream of the intron 19 3′ splice site spanning nucleotides −496 to +1,912e were utilized to design ASOs to target retained intron 18 or 19 SYNGAP1 RIC pre-mRNAs. Table 1 lists exemplary ASOs that were designed and their target sequences. From this design, 2′-O-Me RNA, PS backbone, 18-mer ASOs shifted by 5-nucleotide intervals were produced and utilized to target SYNGAP1 RIC pre-mRNAs to increase SYNGAP1 protein production (see FIG. 6 and FIGS. 7D-E). The splice site intronic regions flanking alternative exon 19 are not targeted to avoid affecting the inclusion level of exon 19.

### Example 4: Improved Splicing Efficiency Via ASO-Targeting of SYNGAP1 Introns 15, 18, or 19 Increases Transcript Levels

[0193] To determine an increase in target gene intron splicing efficiency with ASOs we used the method described herein. ARPE-19 cells, a human retinal epithelium cell line (American Type Culture Collection (ATCC), USA) were mock-transfected, or transfected with the targeting ASOs described in Examples 2 and 3. Cells were transfected using Lipofectamine RNAiMax transfection reagent (Thermo Fisher) according to vendor's specifications. Briefly, ASOs were plated in 96-well tissue culture plates and combined with RNAiMax diluted in Opti-MEM. Cells were detached using trypsin and resuspended in full medium, and approximately 25,000 cells were added the ASO-transfection mixture. Transfection experiments were carried out in triplicate plate replicates. Final ASO concentration was 80 nM. Media was changed 6 h post-transfection, and cells harvested at 24 h, using the Cells-to-Ct lysis reagent, supplemented with DNAse (Thermo Fisher), according to vendor's specifications. cDNA was generated with Cells-to-Ct RT reagents (Thermo Fisher) according to vendor's specifications. To quantify the amount of splicing at the intron of interest, quantitative PCR was carried out using Taqman assays with probes spanning the corresponding exon-exon junction (Thermo Fisher). Taqman assays were carried out according to vendor's specifications, on a QuantStudio 7 Flex Real-Time PCR system (Thermo Fisher). Target gene assay values were normalized to RPL32 (deltaCt) and plate-matched mock transfected samples (delta-delta Ct), generating fold-change over mock quantitation (2̂−(delta-deltaCt). Average fold-change over mock of the three plate replicates for ASOs targeting retained intron 15 is plotted in FIG. 7B. ASOs targeted to positions −31 and −36 demonstrated increased target gene expression by >1.5-fold, implying an increase in splicing at that target intron. Average fold-change over mock of the three plate replicates for ASOs targeting retained intron 18 is plotted in FIG. 7D. ASOs targeted to positions +36 and +41 demonstrated increased target gene expression by >˜2-fold, implying an increase in splicing at that target intron. Average fold-change over mock of the three plate replicates for ASOs targeting retained intron 19 is plotted in FIG. 7E. ASOs targeted to positions −55 and −60 demonstrated increased target gene expression by >2-fold, implying an increase in splicing at that target intron. Together with whole transcriptome data confirming retention of the target intron (Example 1), these results confirm that ASOs can improve the splicing efficiency of a rate limiting intron.

### Example 5: Identification of Intron Retention Events in SCN1A Transcripts by RNAseq Using Next Generation Sequencing

[0194] SCN1A intron 21 retention was confirmed using an RT-PCR assay described in FIG. 8C. Intron 21 is retained in SK-N-AS and RenCell VM cells indicated by the presence of a band in the nuclear fraction.

### Example 6: Design of ASO-Walk Targeting Intron 21 of SCN1A

[0195] An ASO walk was designed to target intron 21 using the method described herein (Table 2, SEQ ID NOs: 10-266 and 524-1037). A region immediately upstream and downstream of the intron 21 5′ splice site spanning nucleotides −264e to +496 and a region immediately upstream and downstream of intron 21 3′ splice site spanning nucleotides −496 to +37e were utilized to design ASOs to target retained intron 21 SCN1A RIC pre-mRNAs. Table 2 lists exemplary ASOs that were designed and their target sequences. From this design, 2′-O-Me RNA, PS backbone, 18-mer ASOs shifted by 5-nucleotide intervals were be produced and utilized to target SCN1A RIC pre-mRNAs to increase SCN1A protein production (see FIGS. 8D-E, Table 3-4).

TABLE 2
List of ASOs targeting SCN1A

| Gene | Pre-mRNA | | Retained | Target Sequence |
|---|---|---|---|---|
| SEQ ID NO: | SEQ ID NO: | ASOs | Intron | SEQ ID NO: |
| SCN1A | SCN1A: NM_006920 | SEQ ID NOs: | Intron 21 | SEQ ID NO: |
| SEQ ID NO. 1 | SEQ ID NO. 4 | 10-266 | | 2593 |
| | SCN1A: NM_001202435 | SEQ ID NOs: | Intron 23 | SEQ ID NO: |
| | SEQ ID NO. 5 | 267-523 | | 2593 |
| | SCN1A: NM_001165964 | SEQ ID NOs: | Intron 21 | SEQ ID NO: |
| | SEQ ID NO. 6 | 524-780 | | 2593 |
| | SCN1A: NM_001165963 | SEQ ID NOs: | Intron 21 | SEQ ID NO: |
| | SEQ ID NO. 7 | 781-1037 | | 2593 |

TABLE 3
SCN1A Intron 21 ASO Macrowalk

| SEQ | | | |
|---|---|---|---|
| ID | | | Retained |
| NO: | Name | Sequence (5′-3′) | Intron |
| 63 | SCN1A-IVS21+6 | CAGAGAAAAUAGUGUUCA | 21 |
| 64 | SCN1A-IVS21+11 | AUAUUCAGAGAAAAUAGU | 21 |
| 65 | SCN1A-IVS21+16 | UAAAAAUAUUCAGAGAAA | 21 |
| 66 | SCN1A-IVS21+21 | AACAAUAAAAAUAUUCAG | 21 |
| 67 | SCN1A-IVS21+26 | UUCCAAACAAUAAAAAUA | 21 |
| 68 | SCN1A-IVS21+31 | UAUUAUUCCAAACAAUAA | 21 |
| 69 | SCN1A-IVS21+36 | UUUGUUAUUAUUCCAAAC | 21 |
| 70 | SCN1A-IVS21+41 | AUUAUUUUGUUAUUAUUC | 21 |
| 71 | SCN1A-IVS21+46 | AUGUCAUUAUUUUGUUAU | 21 |
| 72 | SCN1A-IVS21+51 | GAUGUAUGUCAUUAUUUU | 21 |
| 73 | SCN1A-IVS21+56 | UAAUAGAUGUAUGUCAUU | 21 |
| 74 | SCN1A-IVS21+61 | CUAAAUAAUAGAUGUAUG | 21 |
| 75 | SCN1A-IVS21+66 | AGGAACUAAAUAAUAGAU | 21 |
| 76 | SCN1A-IVS21+71 | UUCUUAGGAACUAAAUAA | 21 |
| 77 | SCN1A-IVS21+76 | ACUUUUUCUUAGGAACUA | 21 |
| 78 | SCN1A-IVS21+81 | UAUAUACUUUUUCUUAGG | 21 |
| 258 | SCN1A-IVS21−16 | UGCAUGUUUUACUUUGGA | 21 |
| 257 | SCN1A-IVS21−21 | GUUUUACUUUGGAGUAAA | 21 |
| 256 | SCN1A-IVS21−26 | ACUUUGGAGUAAAAAUAA | 21 |
| 255 | SCN1A-IVS21−31 | GGAGUAAAAAUAAUUUAG | 21 |
| 254 | SCN1A-IVS21−36 | AAAAAUAAUUUAGACCUG | 21 |
| 253 | SCN1A-IVS21−41 | UAAUUUAGACCUGAUGUU | 21 |
| 252 | SCN1A-IVS21−46 | UAGACCUGAUGUUUAAUA | 21 |
| 251 | SCN1A-IVS21−51 | CUGAUGUUUAAUAAAUAU | 21 |
| 250 | SCN1A-IVS21−56 | GUUUAAUAAAUAUUCUUA | 21 |
| 249 | SCN1A-IVS21−61 | AUAAAUAUUCUUACUGAU | 21 |
| 248 | SCN1A-IVS21−66 | UAUUCUUACUGAUAUAAU | 21 |
| 247 | SCN1A-IVS21−71 | UUACUGAUAUAAUUUUCA | 21 |
| 246 | SCN1A-IVS21−76 | GAUAUAAUUUUCAAAAGG | 21 |
| 245 | SCN1A-IVS21−81 | AAUUUUCAAAAGGGAAUA | 21 |

TABLE 4
SCN1A Intron 21 ASO Microwalk

| SEQ | | | Retained |
|---|---|---|---|
| ID NO: | Name | Sequence (5′-3′) | Intron |
| 2596 | SCN1A-IVS21−27 | CUUUGGAGUAAAAAUAAU | 21 |
| 2597 | SCN1A-IVS21−28 | UUUGGAGUAAAAAUAAUU | 21 |
| 2598 | SCN1A-IVS21−29 | UUGGAGUAAAAAUAAUUU | 21 |
| 2599 | SCN1A-IVS21−30 | UGGAGUAAAAAUAAUUUA | 21 |
| 2600 | SCN1A-IVS21−32 | GAGUAAAAAUAAUUUAGA | 21 |
| 2601 | SCN1A-IVS21−33 | AGUAAAAAUAAUUUAGAC | 21 |
| 2602 | SCN1A-IVS21−34 | GUAAAAAUAAUUUAGACC | 21 |
| 2603 | SCN1A-IVS21−35 | UAAAAAUAAUUUAGACCU | 21 |
| 2604 | SCN1A-IVS21−72 | UACUGAUAUAAUUUUCAA | 21 |
| 2605 | SCN1A-IVS21−73 | ACUGAUAUAAUUUUCAAA | 21 |
| 2606 | SCN1A-IVS21−74 | CUGAUAUAAUUUUCAAAA | 21 |
| 2607 | SCN1A-IVS21−75 | UGAUAUAAUUUUCAAAAG | 21 |
| 2608 | SCN1A-IVS21−77 | AUAUAAUUUUCAAAAGGG | 21 |
| 2609 | SCN1A-IVS21−78 | UAUAAUUUUCAAAAGGGA | 21 |
| 2610 | SCN1A-IVS21−79 | AUAAUUUUCAAAAGGGAA | 21 |
| 2611 | SCN1A-IVS21−80 | UAAUUUUCAAAAGGGAAU | 21 |

### Example 7: Design of ASO-Walk Targeting Intron 23 of SCN1A

[0196] An ASO walk can be designed to target intron 23 using the methods described herein (Table 2, SEQ ID NOs: 267-523). A region immediately upstream and downstream of the intron 23 5′ splice site spanning nucleotides −264e to +496 and a region immediately upstream and downstream of intron 23 3′ splice site spanning nucleotides −496 to +37e are utilized to design ASOs to target retained intron 23 SCN1A RIC pre-mRNAs. Table 2 lists exemplary ASOs that are designed and their target sequences. From this design, 2′-O-Me RNA, PS backbone, 18-mer ASOs shifted by 5-nucleotide intervals can be produced and utilized to target SCN1A RIC pre-mRNAs to increase SCN1A protein production.

### Example 8: Improved Splicing Efficiency Via ASO-Targeting of SCN1A Retained Introns Increases Transcript Levels

[0197] To determine whether we can achieve an increase in SCN1A expression by improving splicing efficiency of SCN1A intron 21 using ASOs, RT-PCR products are evaluated by Taqman RT-qPCR. To this end, cells are mock-transfected, or transfected with ASOs described for intron 21 in Table 3, independently, using RNAiMAX (Invitrogen) delivery reagent. Experiments are performed using 80 nM ASOs for 24 hrs. To quantify the amount of splicing at the intron of interest, quantitative PCR was carried out using Taqman assays with probes spanning the corresponding exon-exon junction (Thermo Fisher). Taqman assays were carried out according to vendor's specifications, on a QuantStudio 7 Flex Real-Time PCR system (Thermo Fisher). Target gene assay values were normalized to RPL32 (deltaCt) and plate-matched mock transfected samples (delta-delta Ct), generating fold-change over mock quantitation (2̂−(delta-deltaCt). Average fold-change over mock of the three plate replicates is plotted in FIGS. 8D-E. Several ASOs were identified that increase the target gene expression by >˜1.25-fold implying an increase in splicing at that target intron.

[0198] While preferred embodiments of the present invention have been shown and described herein, it will be obvious to those skilled in the art that such embodiments are provided by way of example only. Numerous variations, changes, and substitutions will now occur to those skilled in the art without departing from the invention. It should be understood that various alternatives to the embodiments of the invention described herein may be employed in practicing the invention. It is intended that the following claims define the scope of the invention and that methods and structures within the scope of these claims and their equivalents be covered thereby.

The application's sequence listing, which the Patent Office published only in electronic form, follows.

SEQUENCE LISTING (2595 sequences)

SEQ ID NO: 1 - DNA, 84480 bp, Homo sapiens
aatgtgcaggatgacaagatggagcaaacagtgcttgtaccaccaggacctgacagcttcaacttcttcaccagagaatctcttgcggctattgaaagacgcattgcagaagaaaaggcaaagaatcccaaaccagacaaaaaagatgacgacgaaaatggcccaaagccaaatagtgacttggaagctggaaagaaccttccatttatttatggagacattcctccagagatggtgtcagagcccctggaggacctggacccctactatatcaataagaaagtgagtgttttttatcaggcatattttgctgctaattgcctactgcattccttggactgttgtagcaccaacacatgccaaattagcacaaaatcttaagtatccttctgtttaagaaatgaaacacatttgtgggtggtttatgcatatacatgagaaatgaattgattatatcataacatatgcaactgtcccaaatgcaccatgacaaataaaaagaggccaggtgcggtggctcaagcctgtaatcccagcactttgaggggccgaggcaggcagatcacgaggttaagagattgagaccatcctggccaacatggtgaaaccccttctctgctaaaatacaaaaaatttgctgggcgtggtggcacacgcatgtagtcccagtcactcaggaggctgaggcaggggaatcccttgttgaaccctggaggccgaggttgcagtgagccgagatgacgccactacactccagcctggagacagagcaagactgtgtcaaaaaaaaaaaaaaaaaaaagaaagaagagagggtgggagggaaggaaggaaggaaggaaggaaggaaagaaagaggcagctaatttaacaaattgacagattctctccacagattcgatttactatacaatttttttgtactttctgtacttggaaatacttggaaatctcaaaatcatgagttataaagactatacaaaatattagtactaatttttcatgcaaacaaatttgatgccacaagggtttgcaatttcaatgtcatgttataaacaacaaatcaattaatttcctgaagaaattttgttacctgtaaaataacatttttacataaactagaattttacaagttatttaatattttggtattaatgtactaatattggcaagaattaacaaaaatgtcataacctgaagaacctataaacaatatttgaatgcgtgcttttttcatatccatgcttgaaatgaatcttatgttaagcatccaaccgttcattatgactgtcatttcaccaaaccaaaacaaaaagcataaaattttttttaagattattgcattgattttaaattaaatgtatgacgttaggtgattcgtaacattttcttctttatcacttgacacaatgcatttgtgaatcttagtggaaaggtagggcacaaagattgtaattaagtaaatttttttgttggacctggaccttaaaataccccctaaacttttagggactctgtttctggcccagttctgtgtgaagttagtccttgccaaatgcatgcaaaagtttggcatttgtaatatgtgaatttgaggcagttttataaatcacttccgattgacagctacagtttcggaggaaagagcgtcacaaaaggttgactagccttaggttcagatttttttttaacttttcaggatatagtcagtttaagtataacatattttcccttttttttttttctttttgagacgcagtctcgctctgtggcccagactggagtgcagtggtgccatctcggctcactgcaagccccacctctcgggttcacgccattctcctgcctcagtctccccagtagctgggactacaggcgcctgccaccacgcccggctaattttctgtaattttagtagagacggggtttcaccatgttagccaggatggactcgatctcctgacctcgtgatccaccggcctcggcctcccaaagtgctaggattacaggcgtgagccactgcgcccggccagtattttcctttttttttttttttaaacattatacaactttaatgttacaccatctacaaatctaaattacatttaaaattatcagttgacagtggtactaggatttactttaggaatcactacatatttcccctttttaaaaactgatctattcattttacagtagaggaagggatggatcattttccatgtatttcattttcctctaactttgcttttgaacaccatattgtcaaatcttagttgataagagattattaatctcataactgccatttaagttatgagaaaagttgcactttattatttaatcaactctttggaaattaatgtatctgaaaagccaaagcccaaactaaacaaactacaaggactttatttgtataagaaaagtaaaaatgcagataatccaattgcctaaacattttaattcgtttaaaatgacttcggtattgaagtgaagactgatgtgttccaggcagaaattcattcacagtatagagtatgctactgtatttatagccattggatacttttagtttattcagaggctgctcttgggatatgttagtgggctccatcctcaacaggccttttgctacccccagacaccgggtcctcacctctttggtagcaatcaccatctaaaaattattaaagccacccagcatctatcccttaatcaaacagggaagaaatttagtatctctgctcctatgctgggtccttatttgtaaaataataaatgaatgttttgagaaagaccaaactaatgcatgttgacaaaggtagacattcttcatctggaaaccagaacaaccaatcaatcttttttttctttaattaaagagctttcagactgataaaagtgattgtctcgaggggatgtccctaaacaaaatggtccataattggtttataatgaattatatatagcaaaggatataaagacagatgtaaaacaaaattgtgcaaacattttcaaaatactcaaaagaaacatcttaaaactgagggtgaaaggccaactctgatgaagtgacagccagattcttgtgtcgaggaaacccttataaactttgttaggctcacgtctaaacttgctcttaacatcttctgttcttatcttcaaatgcacatggtatgaggaaagaaaagcattttggcattttggagcaaatcacagtgtgcaagtagaacaacctgataagggaaatattgttatcaggaaagagttttccccaaggtaaggtatactcatggcttttacattgaactgacagcaagcaaatcttcaaatgtaagtcattcaacagcaatgcacacgaagctttttgcagggctgaaatccttaaaaactaacatggtgtgcttagaacacatgattgagttatgtgtttgaaatttccttcttctgcatttttatgtcttaagacttttataagttgcctgtacacttttttctgcctttaattttcttttctaattggattatttcagtattgaaaaatatccttaaatggaattaatttgctctgactaaagttggaatgcttagcaaaatctgaaccttttaaaaataatgaatatttctttcaatattcgatgactaattttactttagtgactgggttatctgagattggctgggtgatcttcattaaaacaatgcggtacacatacacagtactcttgacacagctaaatggtcaaacagtggaaatgtcaccagggaaaatgtttattaggacgagattttccactaatgctgatactgggggtgtggattagatttgcctgagtgaaatggaatatgcagttagactagtgatttccctaaagttggactctagtacaatagttaatgtgtcatttgcatcagtatacaaagactctggtttctttctcaactatatggaatagacaaaacaagccaattgtaaaaatatttgcagaatccattccttatgttatattttatgttaaagtgcagtagtgtacatgcaaggaatttatgtgaatagaaaaaacacaaccaccacactgaagctctctgtaatcttttacaaaggcagtgtcagtgagcttattaaaatgtcactgctgagagtatattttccaatggcatatgcccacatatttttatcctctttgtcccagtttaagatgtgcaaattatgtaatgttcaaatattctactaaaattgttaaagcagtttaatccatgttcagtaatattgtagtagtaactaaagaaatagtagcatctatgcatcatgaacattcctgatgcatagaagcattagaaggtttttagatcctcagatgttttaagccttcagagttccaggttaaaaactcaggggaaaaaaatgctatcataatatggtgacagtatttttcatatcatgttagctctgactcagtggtctttagaacatgattccagattggtttccctttgtttgtttatttactttagctgtgtagcaaggcacattttagcttgtgaacacacctttttttccctcacgggactttttttcacagtttcctttcatagcttgggctgattttgtaccatttggccctacattcaaattctttacccactctttattacagaaaatgtcttccttctcatgttcttgttaaaattacagacgaatcattattaccatggaagaaaatatcattttaacaatgtgacagtttactggaaatagaatgagacattttagatctgtagtaaaaatggatgtttgttaattatggagtgcagaaatgcattcatttttaaaaagtcctatggatcatttaaaagtaacttattctctcttgctatcaactgtcctgaaaagatgcacactccctttttcttgggctccatgagaagtcatatatgaatttgtgatttcaaattcatgtttggtctatcactgccaaaggagtttttagttgttaaattgggtggagagagtttgttttgtttttaattggaattatggagtttttcttgcaaaagtaattaacgggaaatcagaaaagaggatgattattaaaagcttataatttcacgaattgtcatatgggcagtccccagtgtgtagctgttctttgcttatcatcagctcctgtaaaactaaaagtcacccagactctcccttacatccaggaccctgtagttgacttcccaatctttctcttccctatgcactatttcttccttgtgcttctttttcctttgtcacctccctgtctctgtctcagaaacagtcccaagatggtgatgttgatcaataaaatgatgcttggcatttttagagtatctgccatatctataggagatccttcaactgaaagtttccaaaacccaacagaaacaacttttggggaaaaataaaggaaatgtgtctagtgaatctggttttaatatcaaaatacccagtacctcaaacaatgtcatgagggtactccttttccatggtcagctctgctgtcacccatgctggcttcatttgcaggctggctcttccacaagatggcagaaatagccaccagtggtgctaaactaacatcctacagccttgtaactactatcttctgctaaaacaagaaagaagaaagaaaaaaggcccaggtttccttcaaaagctctagcagttgtcctagaattgagtctaattaggtcacatggcctcctctgaaccactcactttggctagtggtatgtgatggtctccttggtatgggatggtctctgtcatatactaacctgtgttgccaaggggtgggtcagctccaccaagccacatgggaagacagtggggcagagatttactccaaaaggaagagaagaggaactgttagaaaaggtgtcctaagcaggcaaaaaaaaaaaaaaaagctatgtactctacatgctatatataatatcagtataattactgttcttttttaatccacagattctttcaagatagctcttgtctttatttaaaaataataaaactgagtttaaataacttgcctaagactagttttaaaactagaccagtgagtttccatggcccattgccatgttagtttggatttgcagtcatagcactaatcacagcagtggaaaaaaaaaaaagagaagtcagtgatggaatctaaataagcctatagctgtccttcctgtttcctactcatgccattttgcaagatgtgattctggtctcccaggccggcagtatttcccgaacccttactggtcatttcaacacttggccatttcctgcctttgtaaaaccttatttatttattattattattcatttttatcaacatcaccatcttgggactgtttctgagacagagacagggaggtgacaaaggaaaaactaaaatcttagacactcagtgatctagattagcttctaaaataattagaaattttttttcccactaaattccagtagggtgataagcacctattttcaaagaggatcaattcaggaaatttaaattgtgtgcctctataaggaaatggcatttaaattgggatctgaaggttaaaaaggaggagggagaggagaatcttccaaggaaagagaacagcatagaataagacatataatcaagctgacctgtaataggtaagaagagaataaggtgaggttggggaggtagacctggggctagataaaggggatctttcagtacatcttaaagagtttgaaggttatcttcaaagcaaaatgaattcccaacaagtatttaggtacagcagtaacatggtccactttacattgttaaaaatcactcaacttctctatggagaaatttaggagttttatacttgatctagcattttgacaatggagatggagaataatggatagagtcagaattggttttggaggtgtttaggtgtcagacagaaggaagctgatggcctcattttcttagataggaagtttgagaagaaagatactgaacctgaaaattccaatactaaaattggccatgctttggagaaacagaaatgttcttatatgtgtatatttaagagttagaatacagagacgcattttaaatattttaatccttatatttttattgacactttagaattcactaagggcattgacatgttttatttcactttatcctcaaaataatcctaagattggtattagtataatcttctccattgagatggagaaattgaggggaatagtttgctcatagttctcacacagcaagcttgtaatcaagctgggctcaaaagtgttctttccagtcaaagaaaaattaactgaccatataatagtgtagcagacccatggtatgtacattctgatgatatagggctgaaaaatgtttcagctccagattttattctttttccttgttgttataatttcttctctctgctggagaagaggttgagggctctgcagccttggctgacaaaagcctacctaggcactttctagggaggcaccttctgcagagttatctcctccactggccccaaccctccacccagctaaagcataggaacaagcaattttacagactcttctctaggtacaaattcttctcttttgtgtgagcatatggcaacaatgtttaaaaactgactgtgaggcatggagtccacagacatgttttgttaaactaacaaaattatttataattttgaattattttctggcatttataaatcagaaaatctttcacacactcataaaattatacatctaaggattcctcttgaaatatgagttcaggcatcactgacttatatgcctaaaactggcaggtacctattgtcacttagcctctgtgggcattttagtttgtaatctgtggcttaaggaccacatctgtcattaagtgaaggctatatattaaagcttggtggcccacgggtaggcaagtgacacagattgttgtttagtctggttatcactggttggaaggaaaaaattgaatgagactaggagatgaaaaaatattaaatatggcatactctcttcagagtcaggtagaaagcctgcaagaaaacttttcatcccccagtgagccagaaaaggaagaaaagcttggcttgaactcacaggctatgacaaatgagaagggaagtaggtgagaccatttaaagtccttggggaaaaaatattatataccatggaattgacccagcataagaaatgtccccagagatatgtattatactaatggaatctcctgaccatctatgctgctcttcacacccaaaactttgaagcatctctcctcttgcaacatggctctaattctcccccttcatgctggaacctctttccaagccagcagcttagagctatgaaaaacttaatagcacttctgggtaggagctagagccagataattttcctggtctgacttccaggctatttcaaggacagaactctgccattttcagagtaacactttcttacacatagtgataaagtttctcagtgccattcattcagaattgtacttcattaacagtttgatagacctgtgggtctagaaatatatgtgtatctgtgagaatatatgttcacatttccaaacaattgacttccaaatgcatttctggagcacagctcatgtacaagttggaaattgcctgtttcaaactttgaagctaaaggataaatttaaccaaccagtagtatattctacattttgtgtattgttcatcatcatagctcaccttcctgtgttatttcttgtttttgccagtagatttactttaagagtaggaaagtgcaataaatttggagtcagtcctgttatttggcaatgtttcaataatgtttagatgaaacacaaagttacagcttatgtttaaactatgtactttgaagaatatggcccctagattgaaataaatgttaaggtaatggctatatttaaatgagaaaaagaaactggaaaaccatggcttgttaaattcaatgtccatcctgggaaaaaattgtaaacaaatcactttctataagcccagaaacaagaaaagattactagataataacaaatatagcttcataaatagcaatttctaccaaatcattataacataattattttcttagtaactattcagttagatcaaggggcaagatttcaatccacatgtacaacataatcattgataatttggccaatggtttgtgattttttacaaccattaggtaacaaacatattaacagccctgctatgacagaatcatctggattacttatttaaagtataaaaactaggtatcaaaatctgaccagctaaattggaatcacattacctctatgagctaagtacatttattctgttttcaagtgagataactgagtcacagaaagttaagaaacctgttccggatcacactgctggaaggcagcaaagttagcttttgaatcagaaatctaatttcagagtttgcacccttaacataagataaaacaaatcatacttatattttcataatgttgcttcccagattattaaactgttaattaccagggttattaccaatttttctatataacttccttcttgctttttctttaaaaccagaaatgatttttacatggcaaggattgctgaagaaggtatgagcttgctgaacaatggatggtttaagtttaggtctgtgctgcccaatatagcagagattaattagccttgtgtagctattgagtatttgaaatatgtaagtgtaactccatatttcaaagatctaagacttagtataaaaatatacatatctcaaaaattttttatatcaatttcattcccaaatgataataattcagatatgttgggttaaagaaaatactgttaaaattaatttcacctgctttgtttttcttttaatgtggctctcaggaaatttaaaatcataactgtagctcagatttgtagcttacattatatttctgttggaaagtgctggtcaaggtaaccttcatcaattcttctatattctattaaaacaaatagttgagcatctcctagtttataaatgtcttggtgtcataacctatgtatctttgttttctctttagaatgtagcacagggcattgcaaatattgtactaaacagttaatacatgtattctgaattgccatcaattgaaattaacaattggacctaaactaggtccctgctcatacataattaccaacttattgtatatatgcccaataaacttggtacctgtatatgaagacataagtgacaagctagaacaaccctattgtatgaatgttacattcctgcaaataagtctgtaaagtgatttttcatatataaaatctagttgttacctcagttacaatgccatgcttcaacatttgttttgaagcagaaaattatccacgtgttaaaatgatgttattaatttcaaacagttctatttctttgtagaactgcaattaaagcatttgttttggcactaaaatgaactgaaggacaaatattaagaatagtcatagatgtgcctgaattgtactaaaccacaaagtcttgctgcttgtaagtggagccagtcatgtcaatgttcctatgagccttgggtggtaaaaaggggtttgttttgggctagatactactgtataaaccttttctcctccaccaccaactttgaactgtttcttttttattcaaatgacttaatgcaataaaagttatcctgataagttgtattaatgaaatctttgttgaactaattagatttaaaggatgctaagatacttcactataataagctaaccaatacattcttttaaaaagtttttaaaaagtcacccaatttaatagttcataaatcttgattagcttaaagctacacaatatttgtttatacagtttaaggtacagcaatatcttagctagtctttgaactcttccctcttggagccctttcttatacgtatagcggggaaggcaaatatttatatatttgaaaactctagagctacttaagtatttgttgtaagcaaacagtatttccttcagactcttccctcccttcaatatcatcaatgccacttttgggagaaagctgtatctgagagtccttggaaacaagtatccttttattaattcttaacacttataaactgaatgatcggcttcttggctatgtaagcaattacaaggaggtaagatacagacagttgaggaaataaacaaacataagatcaattacatataataagactgacattctaaatggaacttactctgacatgaaagtgctatcatatttaaaattatacatattgggttgctatacaagtctgggtactgttgctttattggaaggctgtttaaaatccatcaataccttaaagctacatctatgaagtttgtacataagcatgtatgtttcaatctgagaaaaatggagttctcacagaagaaatcctatgaaaaaatggtcctttaatgttggccttattgttagcttcctgggtagcaaggatgtcttgcacaacagtatgtcttatgaaaaattaaagcaaaacaaataccgttgttcagtaaaaaccttaccaattccatttataaattcaacttgcaagtattttccattgcacatataaatcttgttaccaaataatcttctacacattctttaaatttttaaaatgaataaagggaatacactgtaaaatcagtaaatgttttcatctaaggcttgaacaattgataattatgcccatttgtttttaacttttgtgtcaaagtattaattttctctatgtcaaaggacttttagatttagaatcacataccaacattgagagtgctttggtttcattaaactcatcttacttagtttcagccctttatacctccttttatcttattttttaaattgacacgtaataattgtacatatttatgaagcatatagtggttttaatacatatgatgtatagtgatcagatcagaataattagcatatccgtcatctcaaacatttatcattttttgtgttgggaacattcaatatcttccttccagctatttgaaactatataataaattatttttaactgtagtcatcctacagtggtgtggagagctagaatgtgttcctcctatctagttgtaattttgtgtcctttaacagatttctctctgtccccacctttccccgatttttgtctagaatcctctgctctttttacttctaggcagacttcctttttggaaccttttgtgtttggtttctgaatcttgcctcttttactttttagtactcagggcagaaatatttcccctcccttcttttagatctctagctttgccttttactttaccactccttgtctgtcttttctgttttggtcatttattacctctggtcatggtttgggctgaacagtggccaaggagccagcatcacaggtgttctcttctaagtatggtcctgtctccttaggatgagcctggttattttccttatccacggaggtacaaacagtaccatcttgattatcctcacactccagcccatgatttaggccatctatggattgtcatttctttctcattatctctttgtatcactactatttgtttcaaaattagcttttaatattatctgaaatcaagagattcttattttaaaatatatatattctgtgttatatttttactggttctcctacctgtgcccctaatatttctttttctttttttcagatggagttttgctctcatcacccaggctggagtgcagtggcgcgatcttggctcactgcaacctccgcctcctgggttcaagcgattctcctgttctcctgcctcagcctcccaagcaactgggattacagggacccaccaccaggcccagctaatttttttgtgtgtttttagtagagatggggtttcaccatgttggccaggctggtctcaaacttctgacctcaggtgatgtgcccactttggcctcccaaagtgctgggattacagacgtgagccactgcgactggccatctgagcccctaatatttctttcagattttactcagcatatctggggggaaaggaagtatatgcagtacatttgaaaggtggaccatatttattcctgagctagctcactttgggcctttctgtgtcgttacatgctcatattcccccacagcaaaggcatttgcattgcacaagtctgttcagatttacgatgatctcacaatgtcattcagggacagaatccctcaatgaatcagagaaaaagagggctaagtattgttggcataggggattgttcttctagtaagcacaggtgaaattctcccttccttcaaatgcgctttgtggtaaagctctatctgttttctggactcatactccttcaaagatgatagagggaatgcaggcagaggtgagacttggagcagtgcttctcaaactctgttgaggatgtgaggtctctattcttctataaaatgaagtaaaaattagtttctagaaaactgaaatgaaaaacaggcccacaacaacatccccctacttttttattattagaatagacagacacaacattaattggccaaattgccttacaaatttctaaacatggactctccatatctatacttaaccagtactggttgggggaccatactttcacagccagtttaggacacttctacccataccagatagaaagtgcttaattttcaaaaaccaactccattagcaggtaggggtgtgggagggtgggtttgctttacttgaatttagaaaatcctgcaagtataggggaaatctgttaatgagctaagactatacaaagattcttagtagaaaataaacataacatttatgcttgctgtatcataacatgatctgtgcagatatgcatcctaaggcttagaaaagaaagctttcgaagaatgggtgaatttaaaatcaagaagcttaaaatttccttccccaaatatgctcttcacagagataaaggctttctccctggctctgtctaaatataagtaagcaccttggaaaacattgagtcagagccctttttatacccttacatgttgcttctttaatgttttgtctgcccactgccaattgatctcaaataagtctaatttttggaaggaatttcattcacattcatggatcctggattcttcaggagcttggagcttctcctctgtgataagaaagcactgcataagataggaagtcaattgggattagaattcaatatgtcagctaactcagaaatcccagtacagaatttagcactcctggtcaacgggtactctccagggatcttggcctccagaaatcaattattggattacatccatctaacccaagagtgggtttgatggtggctgtttttattttctattacgaagagagtgataatgtttattttatgaggatagatggtaaaaacaatctttatttcaaaaatagtatcagttctgttgaatgattttgcgttccacaggattaattttcaagatatttgaattgggaaagctgaaatgactataaaaagcatgtagtgccttaagttttttggaatgaaatgaaatgtgcacccatttaagactttcatttaactcagacacttaaaatatcgagaaaataaatgacttctcttggctaattgtcttatgtacaataaaattgagggtaagtattaggtaaaaggtaagtggtatcattggatttcctctctaattaagaagagatccagtgacagtttgttttcatggggcactttagaaattgtgattgtgctggtttctcatttaactttacaataatttattatgacaagtaacagaaagtagataacagagtttaagtggtttatactttcatacttctatgttgtgttcctgtcttacagacttttatagtattgaataaagggaaggccatcttccggttcagtgccacctctgccctgtacattttaactcccttcaatcctcttaggaaaatagctattaagattttggtacattcatatcctttttcaagtgattaatattaactatttgtacatgatctgtaagcactttatagctaaatatcaaattaagttgggaaatgtccatattatatagttttcatcactctcattttgcatctttgtcatattagcctcattcttaaagttcattaatcacatagacattactgaaacatgtactctttaacattttatatattatatataaacatgtatttatgtacttttgttatctttctaaaaacacttatatgtattgaatcctacaaatctaaagtaagataaccatgtttacctctaccatctttatacaaagtttgtgatggtgtagaattttcagtgagcaatgatatgataacagaaaaatctacttccagactcaagtttatccatagttatgatataaaacacttcagtgtatcttagaataaacctttaagtatattttctgtcagagaatgtcaggagtctttggccagtacttagttaattcttgaaatttcctgatgatttttgtgaaggaagtactggaatattggctgaatttcaaattcaagtcatgagttatgatgctgccatgcaaaactgtttgcttagtaaagactccggaagttaatgagagaagttggcatatatttccaaatggtcttaagggatttggtttcatgattcccattggtgttaaaaaggactccacgactaaattcatttgttaatcaatttaggaaaacaattcacttctgattgtatcttgtttgatagctttgacaataatagatattaaaataccattataattatcataagctcatacttttttttaaaggattctaaaatttgaacggccattctaattttaatatgacagcaagaaatttctttagtggtataaatatgctattactaaaattaaaagatttgaaacataaaaatcatatgatagggtttttatacttagggaagtttccttgtcccagtttgtattcctagcgccatcatgtggtcatttgatgaaaactttctttttcaattatggaaaatttttgttttggcagtaaactatagtggaaagaatattggatcttaatgtaggaaacttatattctagtcctggaccctttatctgattcctctagagcttagtaaggccttatttccctgatttttaaaatatagtgataaactaatttttagggtccctttcagttttataattctgttatgtctgttcatttgttttagctaccacttagagtatatttacttacgtaccgtgactgttccaagcatttccaatacattaactcatttaatctgcatgtagaaatggttacattacaaaatgagtacattattagctccattgtagagaagtaggaagagatacaaggcaatggcacagagaggttgagtctcttggccaacatcactttgctatgttgaattttaattacattcccatcatgttaagtgtcaaccttcaagaatattcacttttaatgttatcgaatcctgctgcacttgtataaactcagtcaaaatagagcaacccaacaattagcatcgtgctgtactttgactacaaattgttttcatgcgttgaactgtgttggataagatgtgtttaagaaattacaatattgcagataagtggccttcctcaacaatttactagtttattcacctgaatgagctcaagtcaatactttctgctgaaaaactgtgcaactccaggtagcacaaaaatagtcttcccactgaagttctctgggaggtgaatatattgatttaataatagttgtaaaaacaacaccttatactgatataatgctttcatatacattacctcatttaatctatacaaatactcagtgaaggtgatattattacccacattttacacatgaagaaattgaaatgtaaggagattagaagacttgcccacaatgcatttatccctgaattttggctaagctgcagtttgggcttttcaatgttagctttttgtaatataacacttggattttgattttcttttgtgtgttccttaacaataacctacattattcagcatgctaattatgtgcactattttgacaaactgtgtgtttatgacaatgagtaaccctcctgattggacaaagaatgtagagtaagttcaacttatatttttaataacatatatacatttgggattttgaaactgtgtcttaatgtagtcttaaaataaaactgaagagcattttattaaagtcattcctagacaaaattacgcagcaagaggacaatgctcattggccctcaggcctgctggcgttatactgattatcactctcttttgcctgtacctggtgttcacctgaagaccaccactcttggacatttacccctttttctttaaaatctacagtagccaaaccaaatgtggtcaaagcaattgcagaaaagagccaatatggtagacattggttccagttaaattccagataaatacattgaatcaagaatcaaaaagggttagttacaaatgccatgtgaagacaacattgaacctcgcaaagttttcatttccatcaggcacattcacttcatgtcaggccaatatagttccaagcgtggtcaccaacaaattgaaaaataatccaaagtttcagggttgtagaacttgaaaattcagtagactgaagactaaactaacagaagtggaactttttgtagagctttcagaaaccagaagcattactaactatattgatgatctctctgttctggggataccttcgaagcacagaggccagatttgtgataactgaagttgggctactctaaccatagctgctcacctgcccacacttcctatttgtaatgcctgttactatacagctgctgacccatagcaactacagaagtattaggttggtgtaaacataattgtggtttttgccattaccttcaattgaagctaatgtttgcaccaacctatttccaagagtgtccaccaacatttgcaccaacctatttccaagagtgtctcctttcctagacacttccaggctgaaaccaataagaaacatgacatcttgaagaaaataataaattttatatacaaaaaaattctaaagtattgaagctaatatgggaggccccacaggttttcagtcgccctagttttcttgtgattttatgccactctcacaccccaatttctgagtagaagatttaaactttggaaacacctaagtttctgaattatcagaagaattttattctaaattaaatttttacttcttataaccctagaagtatttactttgattttaaagaagtccttgttccaagcaagttaaattatcttgtagaaaaaaaaaaacacgtgctaatttgtcagtttcctctcattcttagaacactattaaacttgagatttttttccctaaaagaaaatcatttcatgcttctgcaatattattgattggctattccatcatgtaaacatactaaatatttctcaggagactatatttacataaataccaagacatttcagacaatggctaaatagatttcatataccttgtatttctcacactactcttaagacactttacgaaacaactctttgtgttaggaagctgaatttaaatttagggctacgtttcatttgtatgaaattaaaatccatctgcttagttttcttttttagtatttatctattccactgatggagtgataagaaattggtatgctatgaaaaaacactgttactttatcaaattttttggatgcttgttttcagatacaccttcacaggaatatatacttttgaatcacttataaaaattattgcaaggggattctgtttagaagattttactttccttcgggatccatggaactggctcgatttcactgtcattacatttgcgtaagtgccttttttgaaactttaagagagaacatagtttggttttccatcagtgcttatgcttttaagaataggtttgctttacctgtagaatattttggtgtgatttatacattcaaactctggatttcaatttagcacaacaaaggtctaagtggaatttcactatagcatgaaggctttgcagtagttgaaaactacaattttcacacgtagcatcagtcagaaaatttcacatatgccactcttccacacacacatgcacaaacacacacacatatgaacacacacaatctaatgtcaaaacacaagcatatttgtaatacatctgtgaaaataactttaaaaattacagccacaaaacagttctattggctacacaaatttgcaatgaccttgctgatattacacacagcttcttttattggtttggtaaaataattgaaagtaagtatctactagcatcaaaacgatctgacaaatcaaactaagagaagaaagaagatacttgaaatattatgtttttaatatattaaattactgatttctaagacctgtagaggaatacattctctctgcctctttctgtttctctcctgaccccttttctttcttcttttcttctttccttttatggctctcttcatctctttagtctgaacataaacttccttatccttatctcctattcatatccactcagtaatatgcacagtttatgcaccccaatgcttttttttctagtggcaaacttcctcaggaagagacccagaaaaataatagaaaaccattccagactaagtgaaagtagagtgtagaaggaggcagcccaacaacacttaccctcatccttccttcaggagctgattttttggcctctaacagttgtgatgtagtggataggagcaggagaggtggcactgatacactcaggactccgaatgtctggtcttaatttcctatctgatcaggatgagccaattctttgctaggctctctggtcacagctcaaaagaaggcctacaggacttctatttcttaagaacaaaatggcagtaacaataggcgcagcattggaccctcatcaagtattgttcttaatttgcttaacttttatttaaaagttacactaggaaaatcttatctcatatataaaagcagtaaggcaaactgccttttcatgcctaaatttctgttgggtgatttcatatatttttttctaactaaaaccctaaaccatagccaagatttactttctttttacaagttacacatgatgttggttgcattgctttccagagtgacaacaagggtgtctactttatgaagtttacatttagctaatggccttaaattatgtgaacaaagattaatgatggaatctaattcctgatttaccacttataatatttatcatttaaaatcaccaagaaggtctttataaaagacccatgcaagtaatataaatcctgctaaaatcttgaataattctgatttaattctacaggtttgtaacagaatttgtaaacctaggcaatttttcagctcttcgcactttcagagtcttgagagctttgaaaactatttcggtaattccaggtaagaagtgattagagtaaaggataggctctttgtacctacagctttttctttgtgtcctgtttttgtgtttgtgtgtgaactccctattacaggtacgtcacagagtttgtggacctgggcaatgtctcggcattgagaacattcagagttctccgagcattgaagacgatttcagtcattccaggtgagagcaaggttagataatgagacggacccatcatgtgattcagcatccttctctgcttgacattcagttttacagaaaatcaggaatcataagactaggtgtttcaaagaaaatgattcttattgtttagacataagctttatcagccttggagtttaacaatgtcttatgtgagatactgtaatttgaggtcaaggtgacctgcacttacaaatatcatgggtttttttttttttcaccatgttagttttatcgagaatttgctcccttttaaatgtaccaatctgtaatttcttattcattagagtcattaatgactatgtgtatacaatgcaaatcttctaagttttttgctaacaaaagagaagggaataagacaataaagaatagtgtgagtctgcatggaggatttattatcttaaggcacaattatactgcagaccattttcggttgtacagcaaaatctttcctacttataaataggaattttaaaatatttattcaggtattttgttataaaactgacctctgaccctaatgaaaatatgagacaagtttcagtagcaaaaaggaaaaagacaaggccctttccttaatataggctccatgaagaacatgaaccttccattactctatctcgacataatgggatatgaatcttcatttcattgtttaaatcattacatttctggagtttatcttcataagttcttccccttcaatgaagtgttgcttctccactagcgttgcaaacattcttggatttatgaatgaaatctatgttttcaagaaaattgtgtgaagcttttattatttcacacgtgttaagtcttcatagtaatagacttctttctttcaggcctgaaaaccattgtgggagccctgatccagtctgtgaagaagctctcagatgtaatgatcctgactgtgttctgtctgagcgtatttgctctaattgggctgcagctgttcatgggcaacctgaggaataaatgtatacaatggcctcccaccaatgcttccttggaggaacatagtatagaaaagaatataactgtgaattataatggtacacttataaatgaaactgtctttgagtttgactggaagtcatatattcaagattcaagtaagaattattgttatgtacatttccttaaaaagtagaattggattgtttgtaacacaaaggataaatacttgaggggctggatatcccattttacatgatgtgattagcacacattgcaggcctgtatcaaaacatctcatgtaccccatatatagaaacacctaccatgtacccacaaaaattaaaatttaaaatttaaaactaatgaaataaataaaacaccctctaaaaaagaattactatcatgtatatttggtcttttcattgctaatgtgccttccatctaggaatgaaaaatatttttaaatgattacataacaagacgtgatcttttagaaaattacctaatcaaactatttaacaatatttaaaattatattttatttggtatttctaccccctggattttaaataatagattatttatatttctggaactaaaagaagaattttgttaatcaccttatcaatggcttccacatacatttaacaactttgttcataactactctagttttgactcctaaatgccactttctattttatcatcatttggaaggctgaagaattcagctagaaagaattttcctaggatccttggttgctatacattcttcctgtggtgattgatataatgaaaggagataaaatatgtgaatgccctttgcgaattctacaatactatgcaaatgtaactcattatacattaattacacaatgtctttaatgtatcagaaactgtatagtacactggggaaaataatggaggtaatgcatggcttcagagtgttatagtttaatagattattttattaccttaaggaaataaagtgatacctaaaagtaaatcttattcttatatttaaaaagtagtattacattaaaaagaagaaaattacagttaataaagcttcaggagacagtaatagaaaatgttagttgggtgcagtggctcacacctataatcctagcactttgggaggctgaggctggaggatcacttgaggccaggagtttgagaccagtgtgggcaacatagtgagaccccttctctacaaaaaaaaaatatatacacacatatatatatatatatatatatatactttttttaatgagttgggtgtggtggcatcttcccatctcagcctccttagtagctggtgatacgaatgccagtaggtccacttcaatcaccagctccctgaaatctgttgtttgtttgttttatctaagttcaaaatactgactatgagggttatttagggtttattctctctagggaaaatttattggactgcatttttccaatactcgaagtaaaataatatctgaggtcattttcagctctaaacatctatggttcttattttaaaccaaatgcaaatataaataaaatggttcatttctgaaaataatagaaaattaaatttattaaaattaaaggtaactattataactgaaaaattatattttcctcaggttaaggctgatcattaaggttagatcattgaatttaatgggcaaaacttcatttataaatatgagatatcaaaaattcatccagaaactattatagtcctttctctttgtttaattttaattgaaagttaggaaatactatgtcaactttcctgtctaggttcaaggaagtcagaatattagaaataaaaatgatatttttccttatgtgcttctgtgtcctgtacagaactatgtatggaataaattcctcagaaaacttagcatctagaaaatatatcttcttacaaaatccaacattgattgtttaattccatgtttttctctttttgtcttttatttacttattcattcaataaactttacagaaaggctacccggtctcaaacaaacactaatatagaaataattaatgattgggactttctaggaggaatatttgtaaataaataattacaatatagtagtgtcatcctaagaataattcaagtatatacaggttactggtagcacagtgaggggagttcttaattatgtcaatatttagtagaaagaaagttgaaaataccaaggaaaaagttatagaagaactggacattgcaagaagccaaggagtttgcaagaaacaggaatctttgagataatgtagtgttcacctatagtcattattttagctttagtatttaagactttttaaaattgctttcatttcagttgttgatatgatttatgcatattttactataagttgcctatattctgcaaaatgtgagaatatgttatacttaattattaaaatgtatagtgttaaaaatataggcgagaggaccagaaaatatactattcttttattttgaaatatgtggctgttttgcaaaaacaaagaaattcctgtcattcctgtctatttttactgaatgaatttttttcgtgagaatggtgaacaaatgctaatacctttttgaaagattatgttagtacctgtcattatcactaactttacattcataatgaagaaatactttgcactgtaaagtgtctaaagtatctttgcactgtatctaatctaatgtcatttcttcataatgaagaaatactttgcactgtaaagtatctaatagaatatctagaatttagagggagaagagacaaatacttgtgcctttgaatgaataatatatttaaaattactcaataaacttaaaagtagaacctgaccttcctgttctcatttgagtgtttttaacaatgcaaatgttcatcatacgactttcttttttcaaacaggatatcattatttcctggagggttttttagatgcactactatgtggaaatagctctgatgcagggtaagtcaataatttgtgtgtatctgtgtatatttgtatgtacacatacatatgtgtatcttttctctctttttatagaaactgaagataacagccaactaattttattgacattaatttgctatatgtaaggtttttgataaagtatgagattatgtaaatattaggtaagatttatgttttctaaaacaagaagtaatacttttagacacatgcacacgtatgttcattgcagcactattcacaatagcaaagacatggaatcaacctaaatgtccatcaatgataggctggataaagaaaatgtggtacatatacatcatgggatactatgcagccataaaaaataactagatcatgtcctttgcagggatatggatagaactggaggctattatccttagcaaactattgcaggaacagaaaactaagtaccgcatgtcctcacttataagtgggagctaaatgatgagaacacatggacacatatagggaacaacacacactagggcctaccagagtgtgcaaggtgggaagagggagaggatcaggaaaaataactagtgggtactaggcttaatacctcagtgatgaaataatctacacaacaaaccctcatgacacacatttacctatataacaaacctgtacatgtacgtacccctgaacttcaaataaaagtataaaaaaagagaaaaatatctattaaacacctactgtatataacagcaaacatacaaaaagaggagtaatcctgttcctacttttttaggagtatataataataacaatgttgttcttttagataagtatattgagctataaactctggagactccatagtagtaaaaatgaaatggaggtgttgaaaatgcaaattatcaacaaaaattattttgtaaaatattattagaaatgctgcaccatattttaatgatgacaccaagtagctaataagactatatgcagtcaaaagttgggaaatagattagttacttatttgtcaaacttttattttgaaataccaaatctttctgactaggcaatatcatagcatagtatcagagtaaaaaggcagcagaacgacttgtaatactttcttttaccccacttgcagccaatgtccagagggatatatgtgtgtgaaagctggtagaaatcccaattatggctacacaagctttgataccttcagttgggcttttttgtccttgtttcgactaatgactcaggacttctgggaaaatctttatcaactggtgagaactaaagagccacactctccatttaagtaaaagtatacaagaaaaccaattgagttatgaaattaaaaccggatgataatatagtagaaagagcagaacttgaaacgagacttgagttcctctatcctattgattataacacatactgagcagagtgatgccaaggattgcaattctctcccatttcttcttggctcaaaacctgttccctacccttctcagacacagattgtcctaaacagaaggcacattctcccttcagccctatctaccccctcaaatattatccctcaggtgggaagtaatgaaaatgaaaaagcagatatagaaagataactttggtctgttccttgactttcctaaaggctcaggtcgttaatggaggactccatggcattttattgactgtttcattcttggtgaatacaaaaattctgccatagaaatcatagtgtgaatgcataagctagaagagaaggaagaagctgaagttaaagaaacaataaaaaaaaagtacagggtgctatgaccaacataattactatttatatctgagttttgctagacacatgagtaaattgaaagttgaagccaccacttagtgaaataatattgagaaataattctgatatttttgtttgcagacattacgtgctgctgggaaaacgtacatgatattttttgtattggtcattttcttgggctcattctacctaataaatttgatcctggctgtggtggccatggcctacgaggaacagaatcaggccaccttggaagaagcagaacagaaagaggccgaatttcagcagatgattgaacagcttaaaaagcaacaggaggcagctcaggtaaagctgccctgtctcatggcactgaccttttatcgttctgattgttacgtaatattgaagagaaagtgagtacctaagagcaggtggttgtatgaggaattaataatgatttctatattttgatgatccacttacttttatttagtttaattattttatttgagatgtgtataataataaccacaatagaactctctcatgctattttaatcatcttaagattctcaaagtaaagggaaaatgttattttggggtattttcaagtgagagacttttattcaatgagtagactggcattaggaggaaatcatcttttcttagaacaagaaattattggttatcatatgaagagttgctcctctagttcttaaacatagtctccttttttctttaactaaaaatatgttggcttttaacgtggttgctttattacctttataaggaagtgatcaaataatataatgatctctgatacagcagcatccaatagacatatgaatgttaccaatcttacacagattgaccatctaaaaaggattacttgtttttatagtgaagtgttagtcctcacagtgtgataaatcataaaatgcctctcctatctctctcatctttctgtttagcatacaaacttattgtctttactaaagaagaaagttgtttcagaaatattaatttatatgcaagagtaattaatttatcgaggttaccctgggaacaatgataataataaaaaagtgtcaacttagtaccagtacaagctataatcaaaaagcattgttttattccatgcccatgtgccccttaagaaccagtactgatttgaagatggtggggacagtttttggagaactggatgtcttatcttgctcagcagaaactattgattctcccttccccattcttctggatattgtggatgggtgagaaagggattttataactgtccataaataggattaataatattttgagggtattggacaatccaatttcaataactagagaaaggacctcaggtccttatcccattcccctgccttaaactcatcagcttttcttccatactcgagtttctttttcggagaaaagaaaacaacactaattaaataccaatttttaaagtaaatcaaatcccaaaaagtaatgaatttattttcttgttgatacatgttggatatttttgaatacgtggtctgtggagcattaacagagacataataaatgttaccatggagcaaactaaattatctccaaaagccttcattaggtagaaagaaaaaaaaaatctcctcttatacttgcagagaatcttctctgtgagatgatcttcagtcagttcaatatattttttaaaagccatgcaaatacttcagccctttcaaagaaagatacagtctcttcaggtgctatgttaaaatcatttctcttcaatatagcaggcagcaacggcaactgcctcagaacattccagagagcccagtgcagcaggcaggctctcagacagctcatctgaagcctctaagttgagttccaagagtgctaaggaaagaagaaatcggaggaagaaaagaaaacagaaagagcagtctggtggggaagagaaagatgaggatgaattccaaaaatctgaatctgaggacagcatcaggaggaaaggttttcgcttctccattgaagggaaccgattgacatatgaaaagaggtactcctccccacaccaggtatggcactgctgagtttactgatgcatggttgaaaattaaaacatgggagagagggggagaattagaaaatggactcaggaatttttatcaactgaatcaaccactgttgtgttatatttaaacccatcccttcttcacatagttatgcaaaaactttactccacagatatgtaagtctacagctcggtgtagttaagataacaccaagttgacagtcaggagaactggactgtcattctgatactgtctgctgatatttgtctataactaatgacatttaatctttttgatcctcagcacttttaagaaaaaaaaaaatgtggaactccggatagtcgatcaggaatgtccttaggttattttatgattttatgttttttttccccctaacttctttataagtcaccatgcatgcttctgaaaatattagtcatggtacacttgatcaaaaggcacatgactctgaatttcagaagtatgaacttcaagttccaacaatacaatgccttataggtgaaaaagaaataataattaaagtgattttagaaaggtggactaaagtaaattgtgaggagtgttgaaagtttttgaaagacaagatccataaaaaccaaggtggccttgttaaggtcatggtgccagtgttcactgaatgtttaccacgtccattgccatattctaaggatgtttccctttgaacttgagaaatggtcgttcagggtgtgtgtgtatgtgtgtgtgtgtgtgtttcaatatgttaaggttgcaatctatctcctcattctttaatcccaagggctagaaactttcttttatcaaggtaatttaatttaatgtgaatgcacataaaatgagaatgataatcaaaaggaatgaaccatattctgttatgaatgctgaaatctccttctacataatcttgcaaaatgaaatcacattcaaatgtccatattaatatgactttatttgtttgctctttcaaacttctagtctttgttgagcatccgtggctccctattttcaccaaggcgaaatagcagaacaagccttttcagctttagagggcgagcaaaggatgtgggatctgagaacgacttcgcagatgatgagcacagcacctttgaggataacgagagccgtagagattccttgtttgtgccccgacgacacggagagagacgcaacagcaacctgagtcagaccagtaggtcatcccggatgctggcagtgtttccagcgaatgggaagatgcacagcactgtggattgcaatggtgtggtttccttggttggtggaccttcagttcctacatcgcctgttggacagcttctgccagaggtgataatagataagccagctactgatgacaatgtaaggaagttttaaatagttcaggcatggctggctcactattgctgcaccagccagtgtttctacagaacggcaaccttgagaatgattcctggttggtcacgctgtgaatgcacctgcatcttgtaatatctttaatagactaaccaactaaaacttaaaaccttagcagtctcctgcacaaacctgaatgcatttacttattaaaagtgctaaggattgattagacacaataattactgcctccagttggaggatttgctatatacccacactgaatttagatagcaggacattctccaaggctctggtatgaaagtaaatgaatgattctatgtttaagtgtcaagggtatgtaataaatctttccaatggattcttcaagatctctgctttagtttagattttcaaaaacactgcttaagtagatagcttcattgttaccttaatactcctagtactcatatttttcttactaaaaaatgctgatataggtcttctcaaaattaaatgaagagacacaaatacattattaatacagacagataaaataattgtctgtgtacaaaggtatgttatgtgtttgtggatgtatactcagatgaggaatttctaaacagatgctgcctcttcttagactgtttactcacttggaaatatatcagcatgaggaggcatgactaagtcagaattagatgacttattgctttggtaccctggatgaaactgttgtccatgcagcatgtgtgtgttctttttaacatagagtttgtgttgtcaatgaccatctacatcttgtgtccagaaaataagatggcagctaagtgtgttgcaatcatttatacttccttaaaattaaatagctaccttctcaaaaatcaagtgccttgatcacttgtaggacttttaagttactaggcttttactattagttcagaaataagggtaataactgttaaatatatctcttaagagttttatcaactatattaaaattattttgtattttataaaattatgaaatcaggaagttaacatcttggtttttgctgtatgactaaatggttaacagtttgaacattccaggctaatgatacaataagtcagaaatatctgccatcaccaattgaatatgaaagtgcatgatgcatgtgtttcatgaaattcactgtgtcaccatttggttgtttgcttgtcatattgctcaaattaattgtttaatgcattagcatttttttttacagggaacaaccactgaaactgaaatgagaaagagaaggtcaagttctttccacgtttccatggactttctagaagatccttcccaaaggcaacgagcaatgagtatagccagcattctaacaaatacagtagaaggttggtaacaaattctattttcgtttcaattattttcaccaaacttatattgtctcatttcaaacaaatatatttgtgagttgggaatagtgcattctaatgaaaagacagtctaattcaagagctgttatttcttatatctactcagatattctagaagccttaacaatttattttaaaatgagtgatattgggactaagaatgttttcctaactgtgtagcaactctttgaaaatgcagaacaaagcatttctgttaggggtttctaatctcattagtcatagtgaccctctttttgttccattagtttaagacttcagcagtacagcccttttcagcctcatcctaagtactctcaagattgtagaggaagagcaggtcattttcacaaaataaaaacaagctaaaaagatgattcttgggtcacatcaatccctattctagctctcatagtctgaggttgacaatgtagagtcattcacatagggttgcacacacaatatctacaccaccctaaaccatgttcccattgagacgtcacatgaaagaccactcatttaacttgaggccaagtgctgagccacaatgtcagtgcataagacaaaaaactacccattgttacctgggctctatgtgtgtgtctgatgaaatatccttgggaggtttagagtaaactgtaatttttttaacaagtacaaaaaaggttgtctctgtaacaaaaatgtgttgattactgaaaataagtttagtggatatgaaataaatgtgtgtgtataaagtataccttttggtggttcttttttttttttttcttaatctagaacttgaagaatccaggcagaaatgcccaccctgttggtataaattttccaacatattcttaatctgggactgttctccatattggttaaaagtgaaacatgttgtcaacctggttgtgatggacccatttgttgacctggccatcaccatctgtattgtcttaaatactcttttcatggccatggagcactatccaatgacggaccatttcaataatgtgcttacagtaggaaacttggtaagcatattggaaggtaaatgtgtttagtcttcaaattttctgcttgaaaaactgtttacatttaattgtgtatagcagtctttcaaccatccttcatgcttcctggcccctgcaaaatcgcaattatatttagctggctatactctacttttttgccaaaaataatcacccttaatgtgctcacaaaaactgagaaaggcataggcctacagcactacttgaaaagtcaacagcaatatttataatttttcaggatccagaagtagctcatagattaagaacatactttttgagatattattacaatttcccttactgtagaagattaaaataaaattgtggatctcttttatccttcttagtcatcatcactgcaagaaataatttaacaactcaaaaatgtctccagcttttcctcttccaggatctaagtagtacatgtattgtttatccatctattctatatcaaaaccatgaactattgaaaacttccagtacattttgtgtgttatatgattacaaaggtcatttttggtgaagattgccacttaatttttcctttttgtgcttcaaaaacataaattattaaagtgtttgccagtcaactcaacttaggaatactagcttttatttgctgaaggaaagagctatctaaagtaatttatgcatttcctgtaatatttggtttgaagtttaggatttttgatggtagaaaacaaaagcatcatgcataacaacctgcattttattagttatatttttgaagttctactatttatactacagaagtaaatttatttttttcatgtgcataacaaagaatgacaatagtaatgcacctagtataatagataagaatgtataactctgattgagggaaataggaataagcttatagataaataaaagtgctcatgggcaaaatgttgtcagtacttgtggtatataaagtctggacaaaaaggtagtttggtataatggaaagagcactgttaaaaatagatgacttgggctgggcgcagtggctcacgcctgtaatcccagcactttgggaggccgaggcggacggatcacgaggtcaggagatcgagaccatcctgcctaacatggtgaaaccccgtctctactaaaaatacaaaaaattaggcgggcgtggtggcgggcgcctgtagtcccagctactcgggaggctgaggcaggagaatggcgtgaacccaggagcttgcagtgagccaagatggcaccactacactccagcctgggcgacagactgacactccgtctcaaaaaaaaaaaaaaaaaaaaaaaaaaaaaaaagatgacttgtactcaaatcctagttttgccattttcttgctgtatgatatcaagcaagccatttcacccatctgaagacctcagtttccttatctgtaaagtaataattgtatattatctacttcgcgtttccacaaggataaaattaaataatgtatatgaaagtctttcatcaactacaaattgccatacaaatttaagttagtaatagaatcattgtgggaaaatagcataagcattatgttctaagagcaaatcttatgtcatgtatgttattatctggtggaattagattaattttgttttgatcttaggttttcactgggatctttacagcagaaatgtttctgaaaattattgccatggatccttactattatttccaagaaggctggaatatctttgacggttttattgtgacgcttagcctggtagaacttggactcgccaatgtggaaggattatctgttctccgttcatttcgattggtaaaaaaaaaaaaaaaaagcaccaaattcaaaaacctttctaacaatcagggttcttgcatagcaatgtcatagtttttttgccacacaaccattagcattgtaagtttttctgtaacatttgcattgtcaaaaacttttcctacatggaaaaaaattctcaattatttatgaaaacctttatttcaaagaacatagttacgtaaaagttaacgtattactcagttgctattttcactaagtattgcttctagagactactacagttaatatttctagacctaagaaaatatttttaatgaaaatgcatcaccttttaatagtaacttgaaaatatatatagccctttgtagcagtggatgaaaatcagatgtaagatgtgcatgcagaaactttttctaattctgtctctggaaaatatgcatcttgcgaaagtcaaaggagagaaagtctgtaggattactaagcatgcccattaattcacacatatatccttacaagtcaggaaaataattgtagaattataggaaatattccaagtttttcaatgcaggtggatgtaactacatgaatacccctaaggagcattaatgaataatgaacactttacttatatcagggctcagtatgatgttactttgcacactactggcaaattaatatctttcagcagagatatttcagattcagatgttaatattataatatccggccttagaaccacctttataaaacaaattaagaacagttggattccaagtactcattaaaaattcactataagaggcctggcttggtggctcatgcctgtaatcctagcactttgggagactgaggcagttggatcacttgaggtcaggagttcgtgaccagcctggccaacatggtgaaactccgtctctactatatatatatttaaccaggtgtggtggcacgtgcctgtagtcccagctacttgggaggctggggcaggaggatcactttaacctgggaggcagaggttgcagtgagccgagatcactcctctgcactcccgcctgggtgacaaaagaaaaaaaaaaagaaaaggaaagaaaaataattcaccatcagagaaaatgatctacatggttaaaatatggaaaatccagcttttcctagggagtccaaaaattagccatgagcctgagacggttagggcagatcagatattgtaagatattgaattctaatgaccatttctaggtaaagctcaatatatataatgcttttaagaatcatacaaatatatattaatctttcattttccagctgcgagttttcaagttggcaaaatcttggccaacgttaaatatgctaataaagatcatcggcaattccgtgggggctctgggaaatttaaccctcgtcttggccatcatcgtcttcatttttgccgtggtcggcatgcagctctttggtaaaagctacaaagattgtgtctgcaagatcgccagtgattgtcaactcccacgctggcacatgaatgacttcttccactccttcctgattgtgttccgcgtgctgtgtggggagtggatagagaccatgtgggactgtatggaggttgctggtcaagccatgtgccttactgtcttcatgatggtcatggtgattggaaacctagtggtatgtacccacttaagatatgcattttggaaatacaccagcatggcacatgtatacatatgtaactaacctgcacattgtgcacatgtaccctaaaacttaaagtataataaaaaaaaagagtataatttaatggtgactgttttgtcaaaaagaaaaacaaactatgattattggtttaaaagtccattaccttggatatattatcactttaacaacacagcaatatagcagtgcccctgcattttttataccaaattctattttgtcagtcactttatcacattttttatgtgaattacaatagagtatcatattgagatgagcctaaaaggatgtgctgggaccattttataaattcagagccaaggaagagagaagtctaaaaaaagtagagagaaagtgcaaaattaccatccagactaggactaaaaagtggtgtctttaagagttcataatgcttgtgccatttctttgccccattgcagcatatgatattcaatcactctatgtcatatggcagatgcactagccaacctgagttcatcagttctcgaatggctaatgatgcctgagattaccataatggagtaactgatcaatctttatctctcttaaatttggagtgttactgtttatagtatagtaatacataaaatattctaaaggtatgtacattcatgtgccagtctcatggaaatatgagagattattcataaacagctctacttagtcaacaatgaagtatgagaaatataatagattaagaaaacaagtgtcagcctatgttaagctcctaatcttcattctgagttgtaatggttatttttcaattgacatccaatttaatatctttgtttattgaaaaattatagaatgcatttaaatgcatacttggaaacattagtgatttttaagaattctcgtattgtacacatataaatctgttttcttctactcatacaattttagagttaacaaaaccttagattagctcattcaatttcactttacgaatgggagaacttgagagcaacagaaatcatgtctttgtccaaggatgtgctattgagccagtcacaaattcagatcacccatcttctaatcactatgctgtggtgtttccttctcatcaagttttagaacttagagttttttccacacttaaaagaaagaataagtgattgtaatctgctcttccctacattggtgtaaaattataatcatgtttttgttgtttttaaggtcctgaatctctttctggccttgcttctgagctcatttagtgcagacaaccttgcagccactgatgatgataatgaaatgaataatctccaaattgctgtggataggatgcacaaaggagtagcttatgtgaaaagaaaaatatatgaatttattcaacagtccttcattaggaaacaaaagattttagatgaaattaaaccacttgatgatctaaacaacaagaaagacagttgtatgtccaatcatacagcagaaattgggaaagatcttgactatcttaaagatgtaaatggaactacaagtggtataggaactggcagcagtgttgaaaaatacattattgatgaaagtgattacatgtcattcataaacaaccccagtcttactgtgactgtaccaattgctgtaggagaatctgactttgaaaatttaaacacggaagactttagtagtgaatcggatctggaagaaagcaaagaggtaagattctataggtgtgggaaggtatgaatacatatacatatatacatatacacacatacagatgatcctcagcttaatgatgttttgacttaagatttttttttttttttactttatgataatacaaaagcaatagccattcactagaaaccatgctctaaattttgaattttgatcttttcccaggctagcaatttgtggtacaatatactctcatgctgggcaggggcagcaagctgcagctcccagtcaaccacgtgattacaaggataaacaaccaatatttaccgtacagtgtactgtattcaggaaattacctgagttatccaacagtttattataaatcatgctttcctttagatgattttgcccaactgtaggctaatctacatttcctgagcatgtttaaagtagactagggtaagctataaagtttggtagttaggtgtattaagtaagttttgatgtacaatattttcaactcacaatgagtttatcaggaactaacctcattgtaaattgaggaacatttacaatacatgcattatattgcctgtatttattattatatattttccatatagatttttttgacatcatgtaaaattttatttcactgaggaacaaaagatttaactcggaaatgactgataaattaaagggtaatatagtatacgtgtgagttttctcatccttagtaatggatatttgttagatgaatgaatgaacgatctaacaaatagacaaacatcatcagatttaatccttacaataacctggaaagaaatgtgttattatgttaacttttcagataagaaaattagcttagggagcattaggtcacatagctagtgaggggagtgccgagagttgaacttagagcccttgtttacaagttctgtttattgttttttgcatcacattggctcatgtacattgaagagaacttaacaacaagaaatattcttgtagctccttcaactaaaattacactgccctatgcattagcctgtttggactgccataacactataccataactgggtggcttaaacaaccaaaatttattttctcatagtccagaaactggaaagtccaagatcaagataccagcagcatcaatgtctagtgagggctcactccttgggttgcagacagccacctccttgctgcgtcctcacatggcctgtcctcaatgcatgtacatggaaagagagagaactctggtgtctattcttcttcttataagtgcaccagccctatcagaataaagtccaacctgtatgacctcatttaacctttatcaccaccttacaggccctatccccaaatacagtcatattgaaggttagagcttcagcatatgaattttgtggagacaaaactttaatccatagcaacctactttgaaatattaagttaaaagtctaatggatatataagataattaacaaggagtctaggacaaagcacctttacttcccatttagtgtttggaaatctcaaaaacagcagggtgcccatcttttaggctgtatagtctaaatattttaaaggattgaatacattaaagacattttattagagatacaattctattagatatcatcatgtccattgcattttgatagttgtccatggaagataccacaggtatgtgacattcttttgatttagtgactatatcccttaaaagatgcttcaagtatttataatgagtctctgaataatctaggtcagcctccacttttaggagtagggggctaatattggagctggaagcagctgccctgaccctagcattagagctgcttagttaattcagatttgtttgatgagagaagggaaagaaatatagtgcagagatgtaatagtagatagatcctgtcacatttccatgtctatggaaatagattcaggacaaaaaaaaaatagactgtttttatcaaatattgtggacttttttacagaaattttaatttggatattatgtcagttcagactttgtttatttgagttttcctaaggaatcagatgaaggctaattttttgaaaaattgttgtctttataaaattgtttctgaacttctgttaaaataaatttagtaatagcctagtctagcttcctttgtcttgaatctttagacctacatttagcatttgatgaggactaatggctaccatatgctatctgttatattaaaaaggaaaaagactattttacaaagaccatccataagatatacattttctgtaaaaatttgacatgattcttactcttattgtttttttatattgatcaaggctaaaagaaacactaacctttttataaagcaactatccactgaagcactagaggtagttctgtttctttctactttgtggtattttatatcttggaacattgcattaattgaaattttaaatgttaaggtaatagaaactttagagataatttaatgtggtgcttctcaaattgtgagtcatagtttagttagacttgagaaatccctttaataggccagtttttttttttaattttaatgaaatagtgatccgcccacctcagcctcccaaagtgctgggattacaggtgtgagctactgcacccggccaatgaaatagaacagaataacgttagagcacatttcatgtcagagggagaagtcctggtaaatgaagcttttgccacctgtgctgaactttaatgttttgtttgtctaattagaatgcaaccacttggttcatgggcatagtgtctgaagtccaggagttcttaagcttcagaaagactgtttcagctttttgaaggtagtgataatgaagccttcctaaccctaggcagaacagattgctttcttttttggttcccagagatataaggcatagagtatagtaataaataatgcatcttcttgactcatgcgtcttacaaagtactatcatattttagggtagctacttatatgcatgcatgtctctccttttatgtggtgacctacttaaacatgtttggtacaaagtagacactcagatcaaacttttccagctcattcaactcttcttaataaaaccattctgaagggctctcataaatactttctctgattagagcatacttgagattgtcattttaattccaattattttggaccaattttttctctagattcaagattcacttgagttagattttgttgtttttgtttttgttagccatgttaccttgtcactttacaccacccttctaagaaagtaataatctctcatcttttccacatgaattgctgttgaaatgcagttgtatctcatccagacgaaattttgtaattaaatactgaaacttctatttatcccctaatgatacatttcaatttcttttattcatttttgaatctggctttctttttatattctttcacagattaccacattgtatcaaatttcctggcacttttacttcacaattcctttcttcttggtcagaaataaacccacacaatattgtttgccctcattgcttcatcagtcttatactgtattctgttcatcaaagtaaggcataaattatgagatattctgcttttagaggaattaagctgacagcagatgccccaatagatgaagagtctttgttctacattaggaatgctgcctgtagtatattaatctcatcattttggttctttttgttttagcctttattctttttgcctattttcatttatttatcagttatcatatgccagggagactagataaaggagtatactaataagctataaggaatgattttctctctctgtctctgtgtgtgtgtgtgtgtgtgtgtgtgtgtgtgtatgactttcaacctttaagtatgaattttcatattgagacatatgttactgatgcaaaaatgttacctttcatggcctctattagactagtttcatttgaacatgttattgtttccattcctgaattccagtaatgacttatctacaatgcatcattataatacctccaaaattatattaatgccttgtgttaaaattacaagtgcccactgtttattcttcatacactaaatatttgtttttagacatgtgaggccacagttataaagttggtaaatggttatactctggagccagatactgggttatataatttcattttagccgcttactgtgtgactttacctatctaataatcagtttcctcatctcaaaaatgtgcataatgttactgactgcatttctgggacagagtattaaatgagataataaatgtgaagtacttagcacagtgcctaattaatatagaatatctggtaaatcatcattattattgttaccagttgcattccacactgttccagtaagttttcttacaagaattactactggtaacatactccactatttgtctttttttgttgtttgccttttgccctctgtaataaattgttttataagtttatctggggatggtgatacattttatattttctgtttatttttaaattgttttgattacattcttgatatggtaagctccttaaaatatttaagaaaattacttttctaaggggcattccaatcaggaaatacaaacatgcagaaacctaaagacaggaagcaagaggatgtatttggagacaattagtagtttggaattccgggggcgtaaatcacaggagctgaggatgagatgtaggtaaagagtcttggtttccaggaagcaagaatagactggtatgaagagatgtggtgaactggaacctcatatttattttgcctcttacatctgtggtgaactcacacctaactatcctccattccagagcaaactaagggctgttttttctacaccttcctcctattggtctccaaaagaagaaagggaatagcatgagtcacatttcatcctctctttaagtcctaagagacttcaaccttcaaagtacattcaagtaatttgaggaattgttttttaaaacctcagaaaatttcttgactcatgccatagtaggaataatgataagctagaaacatgaatttttattgaacattaataataaagaatggtgacttggacagatctgagagagctttgaaggctgggcaaaactgccaagactatgcaaaagacaatataaaatcttatctccccaaatagaaagtaaatttattttggttttggatagtattttataacatttctatcctccgaagcacctaccacaatgctgggtgcataacagttgcccaataattttttgaggtttggttgatttatatggatactagattaagagcttataagccttaactctactatgagcaaatcgctaaatctatattaccccgtttcctaatttattaaatgagatatctgtcctatgatgcttatagaaatgttatgaagatctaaaagctatttggaagttaaaaatgttcaaaagtgtaaggtgatgtcaagaaaattactacttaattccatttaaataaaaattttaaataaattgagttattaaagttgtaccttttgggaacaaaaaaggcacattactaaagtaattataaaagaaatacatttgtttttgcgatgagtgagctctagaataatgagtaaaaatgtgaggtccttagtaattcaggttatgttaataacagctattgtttaaatgttcaccatggacaaagtactattggagggcatatattgtcccattcagtctttatgccgtaagacacactgttattccagccttaagatgagaaaaataaacatattttgaacaaaggaaaacttgccaaagttacacaaacagtaagtggttggtcctggcagtctgctccatagtctgctccagagtcacgctcttaaccgctacactaaatcttaatagtgtctgaaaatgtactttctttggcatagttctgaaataaataatactatttgttgaagaactaggtacaggtgtcaactatagatttggtgttaacttccaatcactgcacattgggcataggttaacagcatagtctggagtgtttcagagtcctcctgcttagtcctgaaaggtcctgttcctctggtactggcctgcactttaggctgatctgcttctgcatcccacactgacctgtggtggtctaattctacttagagagcacttagtctcccagagtgtgatagttgtgcttaaggagcatccccttctgagtttaaagctgctggaagagtcttccaaatcattaggaagaacttctatgatgtatcattagcttatgaggtctttgagaacaggaaaaacactaaccctgtcttcccttaagtccacagcacatacaacatatttattaaatgaatgaataaataggtgatgggcagttacttctagatttccattttttcccaattatatcactgatatatatgcattttaaatctacttgttgctttgctgatatttttccatctaatacttttatcttacgttatatgggttaaggaacatacgacaatctccaacctaagcacatagtctctaagagatggcaactactctctgcgaagagtactatccatggaacccaagagtactatctccactacttctaattgatcactagggactgccaaagctacctatctttgtccacctctctgcattcccaaggcctttacccagtgtcagacctccatcatcttccagttttactgctacagcctccaaacgggtctcctctcgctagtgtagtcttgacaaaacaataggtggtctttctaaaatgcaaatcccgtaaccgttctgtcctccctaacctttcaggagttgcccattgctcacagtatggagtctatactacttaacatgggtacaagtccctgcaaaactgaccaccgctgactccttcagtatcatggaatagtacacctcacacctccccacccagctatactaatctttcattcaatgtaattccctatgctttatcagttctcatcgttataccttttctctctgacaggaatactctcttactctatcctgcttcacctgactcatcctcacccaccacatccttcttgtcccaaatgtcactttattctaccctgtccttcctagattgagctaggtggtgttctcaatatactctatactactcctattagagtgtgtggcaattgcttctctgtatcctccatctgattgtgaaccgacgagggcagatactaagtctattatgttcactattttatttttcaagtcctagttttgatgcctggcacatttttggtagtgaaaaagttcaaatatcaataattacacctattacaaacaatacaatactgtgatggaaattgttaccatttatcaaataagcatacgccaaacgttattcatgtgttatcttgttcagtccttataacaaggatgtgaagtaagaaccattttacaaattagaaacctaaagcctaaggaggtcagaataattggttaaagtccataaaaccagtgattgtgattcaaactcaagtttctctgatcctctgaacagtagtactttcaactctttcattatatagatatacagtttatttgcccagtagacacttattaagtatgttataatttaacattaaaaatcaatgtcaaaataacattatagaagctctgtgctcaatttggcaaaatgaatttaacaatgaaaattactcatttgatttgcattttggtttctagcttggggattataaatgcaatttttcagaatttttttgttttctttccaatttttttgtattaccatgattttctattgactcaatatgtctgaaatatgttgcttttgttcccttatatttaattattgatacagaagtttatgtgtgacctatcgaaagcaaaattcagagtagtatattagagccgtattcctccacgttcacttttatactgggcaagtgtttgactaaagaatagaaacaactgacattctgtaaatatgaataatcactgaagattgtcctttcaacatacagcttgatgaagaaatcaactgggaataatgtgggaattaatgagttaatatttgagttttctagctgccctgtggaaatgttgagtctcattacagtgtcttttccattgatattatattttcctttgttgagagtctttaataggggtcattttaatttttaatatgcatagtgtacaatagaaatatttactagtgcacaatgtacacaatgaaatattaatactagcatttctgaggttgtagagaacctcattttagcatgacttaggagatatatgtgtcacaatagtaaagtacccagcattaaaatagtacctgtccagctttaaaaataagtactttggataatattctttatatgttaaatatatacatgtgtatgttaaatatatatattaaatatatatgtacacacatatatacatatacaaatatatagacatcgcatgaccacatattaagtatgcttttgacccttaaattccagatttatttatattacttattataatttgaactcctactaaactctataaataagctccttataacaaaccaagtttaaaaataaaaatataaacattgtaggatcaagtcagagaacaagaaaaaaagcatttaatcacttactctcagagaatattgaagaaagttttctttgccttgctttgttttgccttaccctcaaggtcaaaatcatttgctatagtaaagagcattgttaaaaaacaagaaatttgcataaatccactgcggaggaaaactgctcttaccatcagggttgtagttattaagtggttattgaatgccctggtgtacaaggcaaagtggatgcttcatatacaacgtggtctctgcattctgtcagctcacatattaagtcagcctgccaaaaatacatggatgatacaagtcagtgtataagtgtataatttagctattaagattcatgtgtgaaaatatacatattcttaaataaactagcctatttagaaattggtaaaatttaaggttgattcatggtttaataaacattaaaatagattttaagaaatattccgggaggccgaggcgggcgaatcacgaggtcaggagatcgagaccaccctggctaacacggtgaaaccccatctctactaaaaatacaaaaaattagccgggtgcagtggtgggcacctgtagtcccagctacttgggaggctgagacaggagaatgacatgaacctgggaggcggagcttgcagtgagccgagatcacgccactgcactccagcctgagcgacagagcaagactcagtctcaaaaaaaaaaaaaaaaaaaaaagaaagaaagaaagagaaatattccattaatctctaaaacagtgagaacaaattactttattagtgaatagcaaatttcaaaatgaaattaaatttcaatctaagaacaaaaaaggaaaaattaattggccttactgatttttaaatctgtaaaaatacttatttgagaatattttagttttgccgttattgaatttctttagaattttatatgaattcgtatttcatgtgctaacatagaggtggacttttcctacacatctgaagaggagcttttccttccctttttgagtatttaataataatagtgttattatcccaatcaaataaagaattggaccacttcatcttttatctcaaccgttataagaatatattgatgcaaatatactggttatgaaggttttaatacaacttttttagcctatggtaaaatattttaaaaaatagatgacaacatttagattttggataatattaatagcaaaagtaaatatgactgtatattatctcaaaaaacatatttacagaaaatttttattttcaagggttcatggaatatttctataaaagtaaccatatactggagttcaaagtaaagctcaataaatttaaaatagctggcatatagggttatccagtcacaatgtagttaagcctgaaattaataataaattgatagaaagaattccaaccatttgaaaattaagaaattgcctcctaaacaaatattgaataaaagcataataaaataccaaaatagctatttcaaaaataaaagcattttatgtcaaaatttgtggaagaagaccaagtagtcattaatatgacttaatattactaatatgattaagaagggatgaaagaacctaacaaatatctttgagaaattagaaaaggaacaaaaaaggaagaagatatacataaagagaaaaaatagtgaattatcaatgtagcagacaatattggtataacaggttatggttcttaggaaaaaaaaatcagtaagacacacaaactttggtgtatcaggcagaattctaagatgatctcaatgacacttgcccttgtataatccccactccatgagtgtggttggaacctgtggatatggtatcaccctttaattacattacatttatgacaaaaagggggatgatgctgggtgggcctgacctaatcaggcaaactctttaaatgcacagtgatttctcctgctatcacatagaggaagctgaaaagatatgctctgcctggcctagaaaaaagcaaacacccatattgtaaattgcatacagcagccatgtggccagagactatgggtggcctctagttgctgagagtggttctgggccatgagctggcaggaaagtaggaagcccagtcttataattatgagaaatgaactctgccaacgacagtaaacttggaagaagatcctgagccctggaaaagaactggatttccagccaacaccttgacatcatctcaatgagaccctgagcagagaatccaactaggcagtgccagacttccgacctacagaaactgtgagttggtgaatgtatgttaagatgctgggtgtatgctcatttgttacacagacacagaaaacaaatacatttggcaaataatccttgttaggaaaactcaaatgattttctatgtgtaaagagcaattgcaatcaaataagaacactaatactccaatagaaaaataggcaaaagaccaagcaccgtggctcactcctgtagtcacagcactttgggaggccaaggtgggtgaattgcttgagctccggagttcaagaccagcctgaggatcagatgctgtctctacaaaaaatacaaaaattagccgggtgtggtggcatgcacctgtagtcccagttacttgggaggctgaggcagaattgcttgaacctgggaggtagaggctgcagtgagctgtgacttcatcactgcactccagcctgggtgacagaatgagacctgtctcaaataaacaaacaaataatagtcaaaagagacaagtcataaaaaatataactggaagacaaaccttaagaaatattactcctaattgttatcaaataagttaatatcaaaacaatggtagtgtaatttctgcttttcaatttggccaataaaaaagaagaaacaaaagcaaaacatgaaaaggaaaacaaaacaaaaacccaggtaaataatgcattatgctgatgaaggagatccatgagacagatacttaacacaaatctcagaacatggtatctttcaataaatgttgagtaattgaatatttcatatacagctaatagtgaaattaaaagcccagctacatgtggatggtttctttgtctctaaggtgggaatagctatttgcttctccttggtcagagatgatcacaggatttttcatttatttatttgtttgtttgtttgtttgttttttgagacagggcctcactcggtcatccacgccagagtgcagtggcgcaaccacagctcactgcagcctcaacctcctgggctcaagccgtcctcccacctcagcctccaaagtagcatgcaccaccacatccagctatttaaaaaaatttttggccaggcgcggtgtctcacactgtaatcccagcactttgggaggctgaggtaggtggatcacctgaggtcaggagttcaagaccagcctggccaacatggtgaaaccctgtctctactaaaaatataaataattagccaggcatggtggcaggtgcctgtaatcccagctacttgggaggctgaggcaggggaatcgcttgagcccgggaggcagaggtcacagtgagccgagattgcgccattgcactccagcctgggcaacaagagcgaaactccgtatcaaaaaaaaaaacatcatttttttttcttttttttagtagggacagcaggatctcactatgttgaccagactgatcacaggacttttttagccacagtcccaacatgttacccagactgtgcaggcccagcagccatacccactctgaacttcctcatccttttctcctcctgagtccagatctgctccctcatcaccttctcatcagtcctcacttcatatctctcttggatttaagactgtccaaatgtatcatttcaaattctcaaacactacaaagtcatagaaaattaaagctggaactttaaagatcatctcttcattttacatatttaaaaaatgggctaaaggaagaattatttgagcaaagccacgcagaaagtaagaggtcaaaccaggtctgggtttctttccagtttattgttggtggctttctttccactactgtggcctgggccaggagaagggtgaaaaaataaggttgttggctccactggaggccataacttgttttaaaagttcttggaatagtcaattcagaaatggtgagtgacagatgtggtttggctgtataaagtaatttacatcatctacttactccatatatggatcattttaccacatgataatgtatacacatattctgcatatatgcaaataaaatgaccaatatgcatacttattgtaatgaggtatagctataaaatattcatagaggcaccatgttgaatttaaaaagagctttaaagttgagaattttgcatcctagtttgtttttttttaacctattgtgtgctttttgccaaatcaattatactatccaggtctactttaccaatctgaatattgcagttttctgaggtcatgttcaattccaactcctctcagcttctagtaaaaaacctgagtataatttgtcaagtttacctgattggtagtatatgttttcacgtagcaaagctttcacattttgctgcttctgtaagcctggttgttggtacttaacattaaaaagtcagaactactaattatttatttcttgaagaaaaaagaaaacattgtaacttttctaaaatgattcggtgtgacatgatcaccagagtgacatcccattacttttgccacattgtattggttagaagcaagtcacaggtcctgcccatacataagggcaggggattatacaagggcatgacaacagtggccagaaattttggagaccatcttagaattctgcttactacagactgtcatgaagaaagcatgtttgcagacataaagaagagattcttacatgtcattcaacatactgtcaattcttcaagtttatagattaaacccctgaaataacttttttaatacccacaaagatactgtctcttcacttggtattaccccgccccccacctagttactagtggtgttggtgacaaattctaaactttaagagcctttttaaaataatagctctttgcattagcttagtgccaagttgtttcatctgaaattgctaaatcttgaagatttttttcattttatcaccttttttccactgaaattcatgatactaaattccacataatttcccctatattcaccacacatattttttctttcatttaacatcatcttcttaaatttgggcatgcatttccccaaattttgattcaattatggttttccaatacattttcaaaattttttaaattttcatttatgtatttatttattttagaaatgggatccagctataatgctgaaattgttcccaaacttataagttcaagcaattctcctgcctcagcttctcaagtagctgggactatagggagttttccaatcttttaaataatattttaatcaaattttttcatgtatcatgcataaattagatgaaagtggaacttccctgcttgaattaaagccttcagccacttaaggctggagtgagatctctggagaacattggctggaaacacctcttctgtcatattagtaggacagatgcctttcattgcaacatacatactgaatgttggtataattgttgattgaaatttagctgtacaacttatgatctgcagatgatagactttctctaagttctaaagtacattaaagactaagcatatagcattttagaaataatttatacaaattatgtgtttaagcttaatgcctttcttgtttttataaacttactatcatctttgagaaggtctgggtgacttttatattaatgtttttatttattttaatctattgactatgtaaaaggtttactatttgtttaatttaattttaatttctgtattgtattccttatttaacatgccaatcaaaactcttgttgttccccatgttttggctaaaaacagtttagttcggtcacttgtgaacttattttattttgtttgtttttctttcctttcttacactaatgctcatttatttacattatatataaatttctagaaaaagcactaacacttctctcaggttatcatagtttatctagagtaattcattgacataagccccactgcttatggtttaatctttctaatagtcacatgtcactttttctgatgttattatgatttgaaagtaggggaaaattcttcttactattatgagaatcagggtctatcataagggttagccatgatgtggcttaccagcctccctttgcaaaatgctgacttgcgaagtagagcttaagccaaatatgaataccattttttaaatctaatttttaatcatatattgttcctgaaagatgtatacacttctctggatcccaaacattcaactgctccatttatttacaaaataaaaatgacatgtataaaaatgtcactttaggtgccttgttccagcatgggttcattgtttggagtgctacatcaatgttttagcatgagctgcacttgtaattcatcatctattatttctgtttagttttttttttcccccagaggacaaatatcttaacgaatcatataaagcaacctgaatttagtatcttctcagaaatttatatttgtaactatttaaaaagtaaatattcacacctaattttatggttttttaatgtacatgtatctatgtgggggatttaccggtgttacgtttattcaatgattttgacttagtttttataaatacaacaacactttttaaatgcatttttcaaattctacaagattaaattacacacttacagtattttagaatagtgtaaattgatttgaaaataaacataacttattcttgataagcataccattcagctggtgaaaatagaaatgtgcagatatcctaggcagtagccaacgacctgagcaatttttgcacatcaaggtcatcagttattgtattttactgagaaaactgcaagtgtcattaattttgtaagtaagtccattagaatgaagagaagttataataaaatatatgcccaaagtagtccctgtaaagtgttgaaaggggtttaaataagagagcaattattactcttccgcaatgatgggaggaaaaatcactaggagaaaaagtcagagaacattaagaagttcaccttgggccgggcgtggtggatcacgcctgtaatcccagcactttgggaggccgagacgggtggatcacaagatcaggagatcgagaccctcctggctaacatggtgaaaccctgtctctactaaaaatacaaaaaattagccgggcatggtggcgggcgcctgtagtcccagctacttgggaggctgaggcaggagaatggcatgagcctgggaggcggagcttgcagtgagccgagatcgcgccactgcactccagcgtggacgacagagcgagactctgtctcaaaaaaaaaaaaaaaagaagttcaccttgattaacatacagcttctatctgtgaaagacaaatttgggagatttggttggaactctaagttgaaaacaaaaacttcatccatcactaatatctgaaacagaggtattcatctattcattcattcaccaaatgtttgttagtcattcaccatacatacactaagctttgtggaccacaaaggtctaagtcacatgaggctagaatgaggatggccatttttatttatagttaaacaaagaaaaggtaacaagaataaacagaaatttcataggaatttggaatctgactgagaaaatagttatttcagagataaaataaggaaaactgacttttgattactgccaatgtttgaaataagtaaaagtaaacaaaaaaatttgagtctgggtgctgaaagagtgatattgcagaatcaggaatttggttaaagaagtatgtttaagattgtttaaaaagtcattacttagattgagagcatactaaatttgagtattattaggcacacctccactttcctacagtagttcagacagactgtagaatatacttatattgcttaaaaaatgttttaaaattaatttgtaaacatgtagaagatcacttgtctagacctgcgaactttccaagtgcagatattccattggaatgctaataagggcatttgatcatcttttaaatcaccttaaaatttctgaaatatggagtgactccaagctctatgcattaaaaaaagaaagcacacttagaagtatattgtatccatccattgtgactatctttggctttgccattaatgttttacaatttggagaagtaacactattcaccaattcctggatctacagcccacccatggtcccagtttgtttataaagtagtcctcatgaaatagcaaagttattcagaaacatttaacatattttaaatataagataatttagagttcatattatcttgtaatgttcatacaatcatacagttcatacaatcttatgttattaatatccactacattcttcaagagttaccaatgtaatatgggtacttacaagcgcttgctcatgtacttaaaattagtagtaagttttactttcctaacatttagtagacagggtagagttcgtgtatgtccaattgcatgccaactcttatattgttcaattttccattttgatgttattctcatattgtgttacatcatcattacactatcttggttgagtaactcaaagggataaaataggaatggaaatcatataaacttaaaactcaggtttttttgtgaattgagactctaatgaaaaaacatcagaagaaccataaatctacatgtatttttaaaaagtaattctgtaagagtgaccatcttaggtaagcatcctaaaaataaatgtctaaataagaaatataagatgaatatctgaatattaaaacttattgaactgttgatctatttgtcttcttcagagaatgccattttgaaaatgtgtcaaaaagtaacataaggtcttttgggttctcgtaattttcacagaaaatagtcacaacttaggtaagtcagataagtctttgtcttagaaaaagtaaaaaacaatgctttaattcataaagtgaataagtggtttcacttaaaggcagaataaaaatcaatgcttcagaggtatcattaaaagtagtattcctcataagaaaacaaatatggttggcaaaaaagcaaaactagttattggcaatactttattatcagtgtatcagtatactttaatatcatgcaataacaattgcatgatattactagtaatcaaggaagaacaatttttatgtacatgttcatgccaggatctaattcaccttacaattggataaaacacttatgtgcaaagaatcaatcatttatctgtggcacttacatgaagattaattactgagcaactttttgttctgcttattactgacaacctatactgatgaagagtagatttttatgctaatattctattattttgtgagtcttggtatagactggaaaactatgtggggatcagacctagcagataacaattatatatatagaaggtaggtttgctattataattctttgtacctgaatgcctctccacacaaatttattcacaggaaataatatcctttctagttcttaattaattttggcgaaaattgttaaaattctcaaattccactctctaattgtttcatgaagaatgggcatttgcttttctacagtgaagaacaatgggtgatgaaatgttgctcacatggtttttataaagtatgtaatgaatttcattatgtcccggatagtgccaatcaaggtcatttttaaaatatgaaggcacttgttgaagtgacaagtcttagcctatcactttacggccaaatgatgaatctgtgtaatgttgaggataagacataagaatttcttcagaagatcatgtgatgttatgagtagtttgattgagaatgtgactaacgcctgccactaggtgattctcttcgtttgtcagaggaagaaaccaatgacttattcctggatatgttttaaattcagtgcaaatgctagaacagaacacaaagatagtcaaagctaaatgcaacccgaaagtagattatgatctatttactactgtctatcatgttgaacaatcaacttttcagcttctgagcatagtatgcaggcctatttaatgtgttagaatgttgaaattagtcttcagtgagaaatattttataatttcaaagatcatcttcaacctgaattcacagagctatgacagagctacatgccattataggtcctaattttctgtaactgtcaggtaagtttttctattttaagaaattaaaaggaaaggaaagaaggcaactagatatggacccagacatataagctatccttcttcaagcaaatacaaatatttcggtgaaacttttactgaaatatcaacactctcctatgtatgtgaaattcatattaacaattttaatattgtgtttaatttttactatttacaatatcgtgataacgggttgaatggcttgctgctgtgtgcactggaatgcctattgtcgggtctacataagcctgaagtttagaaaatactgtactagatttgatactccaataaggacaatagatatttcagttatcagtgaatactcagctggtagcatattgttggtgttcaaaaaatattagttgaataaattaatgaattaattacacttgccaaaaacttataagccagtttgctggtcttcagaaagagcgtcatgagtttttcctatcttaatatgttagttaatattttctattatctctgccatctttgtcttctgagaactctagaaagagaaatgtgcatcccatcactattgtcaaaatatgaaggatattgttattgttgttgttgtttaactagattttgttctttcagcttcacatggcacattaacataaacatgatttgtcagaggaaactgaattttcccacacactatttatctcattttacaacacttcaggctctaaaatacttgccagaaattgaagatgtctatttaatatctctaaggttgtttattgatgtaatttttgacatattttataacaatttctctccaaatgaccacatttatagtaaataactctgaacaccttaaccatgaatcttagtaacataagtgaaaacaacaggtagtatctgtacacacaggtaagacattgttaaagaaatatgtaaagtcaaacattaaactgcagaataacctaacgacattattttcttctaaggtaagctttctctttctctcctgctccttttccctttctcttcctccctcttctcttccctgtgtcccctgcttctctaatccacaaggcagtgttttgctcagtacatgtggctgatggccttttgtaacctcataacatagcaatctgatttcaagcttacattgtgaattatggtaaaagggttagcacagacaatgattttcttatttcttccccttattcaatctctctttttctctaaaaatatctctacctcaagaagaataaaaaacaaattcatagtaataatcctttcttggcaggcaacttattaccaaaattaaaggactttactttctatgtccatctcacttacagaaactgaatgaaagcagtagctcatcagaaggtagcactgtggacatcggcgcacctgtagaagaacagcccgtagtggaacctgaagaaactcttgaaccagaagcttgtttcactgaaggtaaagaaaagaatcctaatgttaatctttcatttggagtgcagcttgtttagctgttggtcagctaaaataaatcacatataataaaatggcactttgtaatagatataattcaatcacctctaatatgttgacagacaaaaaaacttaaagtctagtgtcatgctttgattatatctgcccaatatgtggaagagattaagaacatggaggaaaaatattttagtaccatcaaaacttctaacttatatttttaaagtaagtagtgatttcacaataagttggcatcttagacactactgaaaatgatcctacacagaatttgccttaaaagtaactttctgactgctaaaactaaacggattgctagtgctaaattgtgtttctttaatgaaaacatcagtttccaataattgttggatgaaatggggaataaatactgccctagaaactctatacctaaacagtcactagttgagcctggtgcagtatgggcaatagatagaagagatatgtttttcctacaactaatatttcctgtggtctgatatccctgggaatttgaggtttggaaatatgcatactttctatttgatgttattttttcataggcctagtataccttcagtcttcttctattccctatacaaatcatgcatatcacttaatgtccttttcaaaactgccctcatctgaccatggtggaacagcagcttgttcctctgaatggctgtaagaagtatttccatttaatttacccgataatatacattatcctatgaaaactctttctctttttgaacagttacatgttacttttctatcttttttctcttcttttcctccattccttcactccttagttccttctttcctccttcccttcttttcttcctccttttctccattcattccctttctcctttttcttcaaacatatcttttcctccttttttttttttttgccttggagcagggatcctgtatttatatctttttcttttttttttttttgaaaaccagattttttttggtaaggttcttgggagtaaggtacatgttcggtgcctttttgtgtgtgtacctaagtgcctttgtgcttacaatggtactcagaagtacctgttgattgcatttagactaagtgaaagcaatgtgtgaggaaggcaatgaaaagtcaaagccaaatcatacaaattagcttttagtgaactaaattaattatgcaaattacataagcccttctaggcacatcacaaaaaatcctaaatggtaacaaatgcagcattgttggaagagatctacatttttactctatatcctttataaaagggaagttttctgcttaacattattaatgtccaatttaaagttcttttctggagtgacttcaacagagtgcaacaggatgatatggtacaaggaaaagctacctcacatttatttgtaatttacaaagtttctcttggacaataacactgtgaggcagacaaagcaaatactgtccgctagggcatcatttaaagtggctgaatgtttccacaacttcacacagctgatgaatgtgctcttactactctaggcttagagagctatgctagcaagacagagatgagcatagtaataaaaagacaagacaaggacattgctaaaggatattatggaagcagagacactttatctacttttatttcaacactttctgcaggctgtgtacaaagattcaagtgttgtcaaatcaatgtggaagaaggcagaggaaaacaatggtggaacctgagaaggacgtgtttccgaatagttgaacataactggtttgagaccttcattgttttcatgattctccttagtagtggtgctctggtgagtgagattaagaaaaggtgatacagcactaatttttagaacactctaatactgatgacttattaatcctttgtttcattgtcttagtatccaatgcatttttaattatcccaccttgtatcttctatagatttactctataactctatatttctggattaacttttactatgtatgtaaatataattttaagaagctaatcattaatttttgcttactattaaatagcccagaaagtgtagcccttcagcttattcattaacaccaaaggatgtgaatattcaattactcattgtttaattaaaaaaagttattggaagccctgggatgggaatatatattctctgagttctgacgaattttgtttctaaatggtatttattattattatctcttgatggacagtagtaagtccttagggaccacttctctgtctttttccaattgtgtgctcactatttttgtgctacttaagaaataatgaaagttggtaacaataaatattgggcagcatgcccaagagattcatttaaggatgggtttatctttataacaaggtgttcacttcatcagaatcaatttatttttataggaaaattatttataaaactataaataaaacatacagatagcattttagggaaacactaacacaaaggaaataccatagatagaaaaagagaaagaaagagagagaaacagagtttgcctgattgaaatgcaagtgtgttacaagtttaactttttataattctaacacagacatatatttacctgtaatttttctgaagaaagaaatattttctacacgctactttagaagtctttcaccgttgaaaggaatgcatacttagaagtgaaacatcgagaggttcataatagaagaatatatattagaatctaaatgaaaagtaatttcatttaatcattgtcacactgtatgtctgttgagaaacataaattattaaaaaaataacaaacaacaacaaaaaagaagcagatgaacccaactatttagtcaaattggagactgcgaagatcaatcacaatttctgctttacaaaagcacaagctttcattatttcttcaacctcctttctatagcaaaaaaaaaaaaaaaaaaaaaaagccaatagaaggaagcaaaataaatgaaacaaaaggaatacataacttcaagttgggatggccacatcaggatacaacatcaagaactatttcctgactaagtcaaattaattcattggaatcatacttttctttttcttccaccaatagtctttcccctgattaaataagtaaaagacctttgcgaggaaaaaaaaaaagtaacagtaactactgtttctctgccctcctattccaatgaaatgtcatatgcatatgattaattttttaaatagcttatggagtataattatttttgaaagctaataatgtgtaacattttctttataggcatttgaagatatatatattgatcagcgaaagacgattaagacgatgttggaatatgctgacaaggttttcacttacattttcattctggaaatgcttctaaaatgggtggcatatggctatcaaacatatttcaccaatgcctggtgttggctggacttcttaattgttgatgtaggtatcgttcatatttttgtctctgttcaaggtagcttgtcttatttatattcaaattctacaatagtgagtctcagaccactatgttatgttgacagactataataaccactaaacgcatatatgcaatgagagtgtcatttctggaagacaagggctaatttaattctgatttaaaataacattgggggatggaatctatggtagttctctagttatctgagaaagctaaagaaaaaacaacacatcagcagtttgtagggaaagtagtgaaacagggaacttaaaaggtatgttgcttaaatcctttatgttgtgagtcagacagactcaagtttgtatcccaggaccatcacttgttgattttgtgccactgagttagtttcttggccccaaactcttgacccccaacttgtacagtattaaaggcactcaataaaaacagtgatgctgttgggtgctacagtcatttaaaaaaattctatttgatctactcaaactttttaaagagtagatttaaatagtagattatatggattatgacttcattataggaagtaaggtatgtagagtgtagggaaagagaagtctactttattcagcagtgaaagttttcctagaatgtaaactagatttacggcaagcccaaacagccctttatagaatttgtatccccaatgattaatactgcatttactgaaaacaagtgactgacttcaagatgtgttaaagttaagcatcatgttttctattatcaacttggcaaaatttcagctttagaaagctacagcaaaactatcctgatttcatattgagtagttttaccccaaaaagatactaacccagcaagactatgagggtttcttgtggaaagtgtttcttgagctaagaatcatgaatgcattatatttccttgaccctgaacaaaggcaaaactaagctatttaaaaaacttaacaatgttactgtgaaatgagccaattgagagaaatctcaaaggaagaattgctttatcacatcaataagggagaaagtttgtaatattgaggtttcaagcattagaagttacattatgtttcaatttcagaattgtttacactataatttaaatctaaatgtaatttaaccctttaaaacttcctgaggttttttttctattatgtttattacacatcagctttttcatgaaagttttttagtgtcatttttgaaacattttaagaaaataattttatagaaaattttgtagtttgtaacaataatatctttattttcaatgttctgttttaattctttaatgaagatcagtatagcactctataaaaggactaattacagcacatctcaaataatgtaagaagtatattaaatatgatacaattaatacattttaaaaaagaaaagtttacaaaaatagtgtgcagtatatgcggaattctccaatactagcatctttctaaccaaataagttataatcttccttgaatacaaagttttagtaaattccttatttagagaattagatacgtaagatttttcctttagtcatgtatattacctacaaatgaatacaaatgaagtaaatttattgctgtgtgtatttggtaaatattcattgattggccctttggggccagatatcatggcagaagccataaattagtataaaaaattttgaggaagttttgtaatggaatttctttctaagttacttatgtaaaaataaacaagtgaaaatgcaaggtattaccaagacaaaatatcaccttcaaaactgatgtagttcattaatttctgagaataccaattatgattagttgaatatactgatgcacagtagaaacttcctgctttttttagtacaacagcagtttttgtattttataactagctacaagaaaagccttaaattcaacagcaacttaataaaataaaggaagaatagccaatgaatttttttccaccttgatttcttcttttattttactaatttttactttgctttttttttctatttattcagttgataaattatatgacatttaaggattttttttcaactagcttttaattaatgtcctaaaaattacatcctttacatcaaactgaaattatttctttaattttttaaaggtttactgaaaatgtctgaacatttatcctctgaataattataagcaaaaattatacttgttgtattatatagcaactacacattgaatgatgattctgtttattaattgttattatttttgtgtgtgcaggtttcattggtcagtttaacagcaaatgccttgggttactcagaacttggagccatcaaatctctcaggacactaagagctctgagacctctaagagccttatctcgatttgaagggatgagggtaagaaaaatgaaagaacctgaagtattgtatatagccaaaattaaactaaattaaatttagaaaaaggaaaatctatgcatgcaaaaggaatggcaaattcttgcaaaattgctactttattgttttatctgttgcatatttacttctaggtgatatgcaagagaaataggcctctcttgaaatgatataatatcatttatctgctgtgcttatttaaatgactttatttcctaatccatcttgggagtttccttacaaatctatatacaaaaaaaagctgatgcattattaaagtactatgtgtaatgatataatggtaatctaaagtaaattctatatcaggtacttattctttgtgatgatatactgtacttaacgagttttcctgaaaataatgtgaatcacacatgtgcctaagtatgagtgttaagaaaaaaatgaaaggagttgttaaaacttttgtctgtataatgccaaagtttgcattatttgaatatattcaagattagatggttagatattaagtgttgactgaatttataaaactagtaatactaacttaaagattacatacaaatccacatcatttttataacaataaagtaaaacacttataatgaacagaaaatataattttgactcattactataggtaatttatacattaaccttaacttgcatcttattggtcagagtcacacaaaatgttattttatccttttcaaagatgcaataatcattttccatcatgcataacagattagaaattttgccattattgacttattttccatgcctttttttacggcatgaagcattagtttatagatatataatataaaaaattagttctgcttttttttaaaaaaaaatattatcaaaacaaaacactgaattgtgtgattccaatagaaaaacactgctctttcacctcctaaggtgtagttacttttatggaaactaagctgtattgtagacttccatttgcactttgtagattgtttatagccttatgttctcttctcaagtcttattataaatgtcactttgtaagaacgtaggacttgtcttcgatttccctaacatatatgaaaactttgtcctcattatcgacaactcagaacaatataatacaagtagtcctcttttatttctcacagagagcctcaaattttcaccaaaatgttaacagaaattatctctggggtgtataagaattaagtctgttttccaattaaatgtcactttgttttgtttcagactggcagtttcagttctggagaaaaaaaatgtcatttgtgtacattctacttgaaaacatgttgcctgaatcaaaataatatattttatatggcttgtgaaatctgaacaatgctaaacatttgaaaatattataaaccttttacatttgaccatttgaaagtttattaaattcattggtcaagtgctcagatatttccatacattacacttcatttctataaaaaagctgatcttatcggtatacttttaattttctcagaaataaccatatctataattattaatcaataatgccttttatattaaaagaggttagtttttgaaacttggagttttagacataaaatccttataaatgctgatagtgatataactaatagtttaaatggtcagatttatgaatatggctctattcctcataatgacaacatacacacagcactaaaatgactaatctcttcaatacgtgtttggcattgtagagtcaaaataacgttataattgattctattttttatacttctagtgtttggatattttattttgtaaaaatataatcatgaatgatggtgaggttggatataagaatgatgattatgattgggaagtgagatttgaacatgctcagaaactctcatttaattctttgccctagcagcataaaatcacaatagctgcgtcaaagcgtaactcaggcactcattttatttttgttgttctgttattttttcaaagcatgtgcttttatgcaacattactgaataaagcatgttgtacagtgcttgataagaagttagaaagtaacaaataaattatcatcacgttgcactttgtgttttgcatgttttatgcacatttctggctgacagcttttaaacatttattgtatttcaaatttccagtccaaatttttcaacttgtaaaattaaactgagtgaattgatgtcgtgaatatctagggtaaaataaaatttgtgtttaaatttgtatttttaatttcctaacctaggaaatcttaaataccttctttttcaaaagaactcaagtcttaatggatagggaaacagacggagagcatcatgaacaaaaagtaacaccaaatgttctgtcatatcagatttctaactaataacaaactatatatttctattttgtataggataatcttgctccaacttggatggggtggagcgctggttcctcccctgagccctttattatgggtactgtattaccccttttgctacctttaatccttgcactgtgacttatgtgtagtggggtgagggagggattgggaagggtactattattgcaccacagtagggaaaatacattatttacatcctaatcccctcttttcaattgtcttaaatttcatttgaaaaaaaaaaaaacctttatgaatttaccctctgtggattttaaccccaatggttgatatctttattaagtttcattgaatatgatttagttatgtgtatatggagttatccatctttggggagattactggattggtgagggcgggggaccctggtgtagaatgattatgtgaaaaaacaatttaacttgttaagctcatgatactgtttgaggcatacagcccctgctgtttagtacattggtctgggtcctgaaaattaccagttagataccatcagttgattattgatatgtatgagcagatactagggtgcaatatttcaggtttcataagactggtattgattgtgaccactctcattttttattgtgtaagttcatatggggttattttcaaaatgttaacaaggcaaaaatatattaagaaatagttgaataagcacatgtgaattgtgttgtaaacaaaaagttagaataaaaaaatccacttatttgaattatgcagaatagaatacatacctagaaataaaacaaaaacgtcttatcatgagtattaagataaaatttaaggcataaactcacttcttagaataagtaactcccaactaactttctaggattttaaaacataacacagtgaaaacatacataaacataactctacattttatttattcttaaagtttaagtgtattatacaagaagaagagtttatattcgagagacagaaaaagtcagaatttttgtttggatcaccaatatatcatagcttacaaaaaaactgtcttaattaaaacccacaacataatttttttagatttttaagaaagattctattattcttctttatacttaaaaatggatgattcctactttgcccacttttatttttattcacatagattttctttatttctattagagaagcactagaattcatgaatagtgttgatttgaagttcaaagtaattaattcagataaaaagacatttctgcatgtatgaaaatttctaatgtgaatttgcatatttaattatcaatccttcatttagtgtagacttatttttaaaaatgcaggtaatgaaccagaaatagaattggttgtgctagagtagagaaactttatttgatgattgttttgaaaaaaaagcttctgagaagaaacaacctctagtacagtattaattcattaagatagctcctttctcagacatttcctttcatgtagcctgaaagttcaatttgaaatttgttctttccaatttattcagactaattctgcctactttcttccccccataagaaccaattactgcagctttattgagactgaaaaaagttaatacacctccttctttgctgaaccaaggaatggcttggaactcttgggaaaagacaatcttttctatgatctttcattgtctaatttaatacatcataaatatgactatagctttgtataataaactccccaatactgtgccagatgttttctaagataaagttattttatgttcacaaaaaaaataaaacttttctctgggccaaatgtatgccaactttgcaaatcatatcctgaagtgcactgctgcagagtacatgcttgcgtcataaattccatagagttcgctttaactctaaatcaatccccagtttcaaagtaaacctctcaaacatattacctaagcacaaacttctccctgtgctcagttccttaattattctcatcccatattcagaaataacatttaaaaattatgctttgatcaataaatactaatctaaactttgcttcattaacccattcatttttgtcaaccattattttattcctatattcaaagctctctggtatgttcttatattcaagacactcaaggccctggaagattcacgaacatatgtttgcatcttaaatttttagaaaatcttacaatctgtcaggattacactgaactctagtacagagtaatatgggtaccagataagtgggagcaactcttccacgtagactggaaacagcactaaatgctatttataggctactttctgaacttaacttgttttaacctcatttttctcatatgccaaatgagaacgcaatactgaattatctgtacagttctgttcagtactagaattctgattcttgaattcaaaggggaaaacattcctctttattttggaggctaaactgggggacaaagttaggctccatgaaagaagtgctatttgaactaaagcctttaagaggggagagtatttcagaagaggagctattagacaaggaatttcaatgtaaatggcatctcaatcacctggcaattatattagcacacggttattatattaattgaagtggcatgaagtatagatgaccagggaagttaaaactggaaatatagattgtggagtgatgtgaataccaaggtaagaaaaatatttgttagttaccagagagccaataaataactttcaagtgggacttggggaagattaattcatcttacatagattaaatgaaggagaaggttaggagacagatgacagtgcaagtatgaaataacagagggcagttctaggtggtgactgtgagaatggaaaagaggtggcaaagctgagaaacgtttcaaagaaaaaatgtgagacaggtaatgtgaaaagaaaatcgagaaataggtatagataatcagtgttctgctcatactctaaattgggtgttgaaggcaaaatacgtattttaattagtactctgtgtatacacactagaaacagcattgtaatctggatagtggacaaaatattcagaaaagaagggaaatagtaacttgatttcaatttccaaatctctaatctgaaagaaatctaattctattcatccatttaaaataaattatataacgagaatttatgaagtccattgtattaatgcagacagtcagatgagataaggcaaagtgtcacgtgtcagcttggtagttgcatcggccacatcatttggttctgcctggataactcaaccaaattaatttttcatactcatcccctccacctttgtcattactggtattcttattttctttggcccacttatcacactgttttatgttccccagaaggcctagagttctttacaggctttaaacagggatcagaagtataagaaattggctcatgtatttttttttcagacaggcagttaaaaaaaattgttctaaaaatacactggcatcaaatggcaaatagaagatgttttgacgactacttccattggatcagactgacaagaataatacaagcacataggtggaattaaacttagctattaatgtccaagtttgaggcagctgccccttataagcattttagggtctgtttttagcttccctcttagccactcctgtgcagctccagtgggaggtatggaggaaaaagcaaggaagccatccctatgttgtttccaaacatgaacactcaagatttttaactagtggtccagaagtaaagagggggaaaacatccttctatagaaaaaaaaaaaagtagataataattgaacacagaacttcatgtgatcacatcagatttgagaactatgtatggcatccctctttttcttattttcctaagaaatgatttctattatgtttcatttgaaataagttttttgaattaaactcagtaaatgaaacaactgacatgactggagcttgaaataaacgatgtgatgatctaatgaaatacataatgcaaattgtcttgcttcttatgcaaaaattattagtcatagcaatgcatgaataattaaagacaattatattaggtatttaataatattttttatatttatcatctgaatttttaagttattttaaaaatatattggtcaaatcaactcaggtccaaatgttttagttttgttctttaatatattgcctttttaaaatgagttaaacttctgtataggctttttaacttttctttattctgataacacaattctgacttcatctggcagcaagttcctctgattttccttttcctttaaccttttaatgcttctccctcccttttttttaaaaacatttttgtttcatttcttggttatattgcctatagttgttttcctaagtgtattgcttaagaaaaaaaaatgaattttaagatttttttgaaccttgcttttacatatcctagaataaatagcattgatagaaaaaaagaatggaaagaccagagattactaggggaattttttttctttattaacagataagaattctgacttttctttttttccatttgtgtattaggtggttgtgaatgcccttttaggagcaattccatccatcatgaatgtgcttctggtttgtcttatattctggctaattttcagcatcatgggcgtaaatttgtttgctggcaaattctaccactgtattaacaccacaactggtgacaggtttgacatcgaagacgtgaataatcatactgattgcctaaaactaatagaaagaaatgagactgctcgatggaaaaatgtgaaagtaaactttgataatgtaggatttgggtatctctctttgcttcaagttgtaagtgaacactattttctctgaatatttttattgtttggaataataacaaaataatgacatacatctattatttagttcctaagaaaaagtatatatttctttctatttaaaaaatttcaatttgttagtacaagtttatgagcccagatgggtgaaaactttattacatgtaaggactgcagatatagtcagtagtgaccagaccaaacaaagacctctttgtcttttttcttgtattttctttgtttctatattgctctttctatataaacaagtaaattaataaatcagtaactttgccattttttattgtgattagaaggcttgtttccctgatcagctaccaaaacggaatacacttaacagatagatcatcttccaaaacacatacacttaatacacctaattggattgtaattaattggtagggattaactgctgctgagttctattatttggatcaaagtttggggaatgacatttaggttttagaattagaaccaggcatagcggtgggtgccactgcactccagcctgggcaacaaagagtgaaactccatctaaaaaaaaaaaaaaaaaaaaaaaaaaagagagagaattatacctggaagcaactagaaacaaaaatgaagcaaaagcagctgttgtcttatctcaaatgacctttcagcaccattatttaagtctattttgtcctaaatattaatgttttcactactgggtctctaagactgggtctccaagaaaaatagtttataatttatatttaaaaaaggtagccctttaaacattttcatttgattctgcttctagctgcagcagcaccacaacaaagcagggaataaaataagagtccagattatttgaaaactcagcttaaaaaaaaaagactgtacaatttctttcttcccttgtggttctacagtgtctttagggcagaaatcaatttttgctcaccaaggttatgatttcaactgttcaaccagaagactaactaagcaaacaaaccaacactggtcaaaacccttttgcagctcttccagaggtgtcaactatgattactttacaaattcttcccacctttttgttggaaattcttatttctcttcttaacatttttgatctactctgaataatattcatgcaattaaaatagagattttttaaatctggtaagaacgggtggggcatggtggctcatgcctgtaatcctagctctttgggaggccaaagctggaggattgcttgaggccaggagatctagaccagtggaggcaacatagtgagaccttgtctctaaagacaaataaaaacaaaagttaaaaaaaatctagcaagaatgctttctttaaaaattgtcgacacatgatgatatttatttgggcacttattctaacccttaactaatgaccatacttgtaaatatcactaaagcaaccacctcctccataaatttgaggaaagaaaaattaaaaattttaagcaatcctttaaaatgtaagcaattctgaaaatacagtgatggtcctgcacaaagctattaaataaattctgccaccaaaaaaaaaaaaaaccctctaaaatactgcttcacatttggcttttatagaatcacctctctattgattagtaagtcattgaaatggtcccttgaatcacttttttgtttctataccaagtgtgtaatggaattgttctatcattgacctaagccactgacatatttaacacatctctctctctttcatatacaaaagccttgtactttctagctaggaatcattactttcttttcactgctgtcacccacacccttgcttagcttttgtctcatgaaatccaccacctcacaagggttagcgttatcagaacaaagatatattgtgatacagacgctaaaggctttgctaacctccctcactagctaagggataatccttttaggcccacaggactcaaaattcatgccccaggacaagtaacaaattactgtaagttgttagcctgagtatccttcatcctgtgagtgccaagtgtctgctgtactattgttcacatttcttattcatattaacttattatcttcaagaatttcagaaagaaaatagaatagggggttatttctaaatgttttgatgcaaaattcttaaaaggattgtatttctaaatgttttgctccaaaattcttaaaaggatagttgcaaccctgcctttatgtatcctggtactatccttacattgttacaataaagagaaatcttaaattttcaatcactttgatcaccctgcagataaattttagcagatgatccttagatctaagttgtaattatttggctgatagagctattgacccatgtgttggcatttgtaagactttctaaaaagtgctccagcaaattttaatactgctttaaatatcatgacaccatgaactctaaagaattgaaaagtgcttgtgagttggttatcaaggggaggatatatcaaatggccattttgttcaatatgtgttctagaaatgaaaagccatactaaaatactgtcttggtccaaaatctgtgtaaaatttgttttgaaatgtctttcaaaaatattcccttttgaaaattatatcagtaagaatatttattaaacatcaggtctaaattatttttactccaaagtaaaacatgcatgtccttcttaataggccacattcaaaggatggatggatataatgtatgcagcagttgattccagaaatgtaagtattccttgtattctaagtctttttacaatattgatcaggtggtaaaattaatcgaataaagcataaacgaccaaatgaaatgattctatcttgatttaaaatatttgggaaaaagtgtgacaggtaaatattcaagcatagcaatgtttatcagaaagatcttactaagataattcaacacatgaattattttgaaaaccaaagtaacaaattcatgtatttagtaactaacaaatattttccttttaaatattttctattttgtttcctatttatccacacattatataattagtagtaattttagtgtgcgggaccaaatttgaagaaatatatgatttctatcattagttgaaatgtatagtcaccctccatattagacagcatgaaaagttatggatattgttctgtcagccttagattactgtgatgatttctttcaaataatcctattttaaaccatataaaagaatgtttttatatgatttttgcattcataaattgactggagcctttactaatgttgcaatcacttctgtgaccaacagattcctttaagtgtatatcaccaaaatataaacctattttatttgatttcagcctctttcaggctccaagacctaaactgaaattcatgctcattccaactttgctcttcaaaactttgtaagatgtagtattttctatcaaccttcatctttctattctcaagtcccatctgtttagtttatcatcataaagaataacctctgtccctgcagtcttcaacctgatagagtttgatgttatctttcttgaagtgcatttcaaatagctttagttttatgttgaatatcattttgataacctccagagttgttttatttcactttgtcacttatattttgttttgtgtgtttagttggtttttaactttgttgcttttagaaggacatgaatctgttaaaaaactatagtgacctttcagtccattactaaattataagtaatagcccatttgttttaagcacaatctaggaattaaataatcaactgaggatttataaaatggactgtccatctatgtctacttaatctgaaaaattcaataactgttactttagggtaaagtgccaaacatctgaatgaacaactcatttcttatttgctacattatttcatgcatacatgaatgactgtttctaaacctagcctgtagatatttacagttttaaattttttattaataattttaaaattactaaaattcagtaccttaaaagcttgcaaatttagcacattactgttcaaatggaagaatattatttgtatttatagttataaaaatagattttagaatgtcataatagccatatttttcacatgaaaacatccctaaaggccaatttcagggatgttttttagaggtagttgattcagaaaaaaaaaaaatgctgacatattagtaagaataattttttctattgttatgaaaaagcaccagtgacatttccagcactaaaatgtatggtaatattttacaaaatattcccctttggtaggtggaactccagcctaagtatgaagaaagtctgtacatgtatctttactttgttattttcatcatctttgggtccttcttcaccttgaacctgtttattggtgtcatcatagataatttcaaccagcagaaaaagaagataagtatttctaatattttctctcccactgagatagaaaattattccttggagtgttttctctgccaaatgagtacttgaatttagaaacaaaatgggagtatatattataactgatttttccttcctcttcctctgtcattcactatccatatatttccggctatagaaagctaagaataactgtgttccacactcttgttcataggttcataaagtttttcctcctcttattcattatcaagaaacattttctatcttttaaaaaataataattagaataaaactagaaagcaaccgaatatgcctctttcccaaaagcaatttgttactttatccctacaactacccactcccccttgaaaatatattttccaactaattctttgcaataaattaggcactggatgtaagcttcttctagtgtttatttttacgcttttttctgtcattgatttcttttatatattcccatttctttctccaagatatttaaatacaagctatccgtttcagtcttgaattgtatgactattatttatcatttataaggctcatttgattgtcccaattacctatgtacattatagaacatatggaaagtaaataaatatcatcacttggaagtaactgctgccattcacattttgttttctgttcagagtatttctgcacatactcttattgttgtactttttatctataattataaattccactttagacttaacataagtattttctcattttgttaagtcttcatatatgcattatcataatttacttattcattccccagtaggttgataatttagattgtttttaatctttaatgatttaaatagtaccttgttgaaagttttgtacaaaaaaaaagagagagggacagaaaataaggctttaattatttcctgagaataaattcccacaatgaagtattttactcccctagagtaatataactactcaaactcccaatatcagtgtatgaacacccatgccaccgttccctcactgtcaccaaacattctgtttttgaatatttgatatttaataggtgaaaactgtatttaattttaatttttatgacttttataaccttaattgttatgacttttatgtattttattacatttgaacatgttcttaaatgctcattggccatttgtatttcttcctttatgtactgttgcttcatctcacttgttcagtaggtttgctttttgtataatgaatgagtgctttcttagactacagaacattctcccctcaattcccttttcttattaccagtagtattcttaagtcaatatcaggctactctatttcacttacttgccagtgttccaatcttctatccctactggtctgtcccatacttactatgctatgagctctgatttatcccctaaatctctcactaactcatccagttttctttttatccctttcctccaattcttgacagagttagagtgacttttttaatgagtaactccaaactgtcttgcagtatacatcctctaactctttgctacatttaaataagaaaattattgcctttaacatcataaaggtagtatgtatagtataaggtaccaagtatttattatctcagtgaaccaaatttcgccactcactaagcataaggtcttgggtaaaatacttaacctttttgagatttgggggtgtttgtcttcataagataataataataaagtcaattttgaattatttagggaattaaatattatcatacctaaagagtacaattttttttacattttaaatcccagatataattatactaatcagttgaattttgtatttctttttttagccatccattttctattttaacattgaaaaaaatgtacaaaaggacacagttttaaccagtttgatttttcttttctatactttggaggtcaagacatctttatgacagaagaacagaagaaatactataatgcaatgaaaaaattaggatcgaaaaaaccgcaaaagcctatacctcgaccaggagtaagaagtatcaaatgatatgggggaaaaatacaaaaacaaaaacttgcatgcttgtctcacaaaaaagaaagtagctaacatttccagtagaaaaaatttctttcacttgtagagcatcatctaaaagtgatgtttgtatcttttatgataatggtaacaacaaaaaaaattaaagaccaaaaaagaacaagaagaaatagaagatacacccttgacttcaagagatttagaagcaccccattacaatccatattaattggccaatggacacatagacaatgtgatgtgcacaagagaaagttaatcacacaactcaagaatggttgccaagtaatatcagggaaagaagtaaaccttgggatggggctgtaagaaatgcaatttcctaatattttaagaaatgaagtgttgagtgaaataacaccttacttctattttatttttcactagagatactaagtgttttaaaggaggaaagaattccagtatctactattcatatgtatggctatagagttaggtattactaatgtctgcagaagtcagggtcagtaattacagtttatgatgataaataacaatactcatgcttccatgatgaaataaacaaattgctatgaaaatgtacagctattatcccacactataaatatttttatgatgatgatctgagaggtttcagtaattcctagggtgcatcaaggaaaaaactactagcaaatattcatattgtgatgattgaatattgccttcctgagaatgatgagaaatatatactttctccattaaaatttagcactaagagtagaaatgaaacaacaatttaggaaaaatataagttggaaaattccctcagaattcctcagtggcccaaagaaataagcctgcagatggccttcagtgactagcagtggcagaaatgggaagcagaatcacagatcaacgacaaagaacgtgaagttttttttgacataaacatataggaaatgtcattctggtctcattatccttgtgcagtttcaggattctgtgtctgacaatgttagccaaggctatttggtagaagaatatgagtattgccatatgtggtatttaaatgcataatgttatagatgtgtcttggaaattccaaattctccttaacaattatttgagaatacaacaagtgaaatattaatagtactatattttaaaatggatgtatggtccagctgatcattggaaagtcttgaaaaaaaaattaaatgggtttcttaccttttcataatcttaaaatgttgatatgtgttgcatacctctggaagaagtatacagtgttgaatgtttcttttgtttgtttgtttgtttgtttgtttgtttttatcagaaaccttctttggataagggattgttattctgagaaatacacattagtaaatggcaatttaaataactaaattttaacaattaatatgctataaatcattcttacaaaaatcagggccaatgactactttgcaagaaactagaaagtcaattaatgcagaaagtacttaatgctaatgcacatgagaaaactcctttgttgttaaaagcatttctatttctctacagaacaaatttcaaggaatggtctttgacttcgtaaccagacaagtttttgacataagcatcatgattctcatctgtcttaacatggtcacaatgatggtggaaacagatgaccagagtgaatatgtgactaccattttgtcacgcatcaatctggtgttcattgtgctatttactggagagtgtgtactgaaactcatctctctacgccattattattttaccattggatggaatatttttgattttgtggttgtcattctctccattgtaggtaagaaatatttaaagttcttaaattcagttaaataaaagtgaaagctgaaacaatcaagattagattcaagatcatcccagcaatcagagataatcactgtaaatattttgatacattttatccaagtgtgtttgtttttttaacaaaatgtctcctactatatgtcagtattgtttcttattctatccatttagaacaatatacttagtgtaaatgtagtaaaacctcattcatttgaactagaactgtgctattaactaaaataaaaatgtttttgacatgttgagattgaagaaccaatatagtatctagatggttctgttaacaagactagaaatgtagtctggtactcacgaaaattgctttagagaatagacatggagtcaccagcatatagatattagtggaaagtggtttcaagataaggaaaagtattgcataaaaagagaataaagacaaggactaaacattagcaaatgcatatagtaggttctctgcaagtgtcatgtagagattttctagactaccttaaaaatgggtttatcataatgatgcacaagggaaataaggtggcatgggacatcatcagtactatacttcaaagcctggaacacataactagcctcatgagcaatagctcatttcattagacaaaactaaagctctagtaaagtaaaaagcatctgtctgtgggcctattcattcttccctaaacaggatgatatgattgggtcaatattttactatccaaaacgaggcacctgtgttggacagattttcatgccactcccctctctgaagaaactggccttatatccagctcattgtatatagcctttgattcccactaattataatccttggttataactagtgtggctaaggtataaaagttgtattctcacacgtctccttctctctctctctctctcacacacacacacacacacacacacacacactcttacacttcgtcttttcagaatgaggcatttaaacttgaaggcatttagtttcttgagctcttctttttaactttacaagtattgtttttatctaaaaagcaaatggagagagaagctgaaaataagaagactgagattacagtgttaggtacaggagaccaaaaagaattgaaatacaacattaagtacaggatactaaaaagagcatcaacctgggatcctttcagaaatgcaccagaacatacataaatgagtatataaaaatattagagtggaatttaagtaagtaccaagatcatggggagatgaaagtagcatcaaaagctaccaatactttcagatggaaaaggagtaaatagagaatttagaatatggcaatttcagaaaaagtcactgtatacatataaacttgtacctatactgttgggctgctactgttcggccaaatgtgcatttttaacttattttctttttaaattctgacttgggactttacataaactaaaagtagtttataaacatctcttaaagataaaaaaaagtactataatccttataattgaaattattgctgaatttcaaaattaagatttataatatattatgtacaattatatatatattatatatagttgtcatatttaatataactgggttcaggactctgaaccttaccttggagctttagaagaaacatatgtttattttaacgcatgatttcttcactggttggtattctcattgtttattcataggtatgtttcttgccgagctgatagaaaagtatttcgtgtcccctaccctgttccgagtgatccgtcttgctaggattggccgaatcctacgtctgatcaaaggagcaaaggggatccgcacgctgctctttgctttgatgatgtcccttcctgcgttgtttaacatcggcctcctactcttcctagtcatgttcatctacgccatctttgggatgtccaactttgcctatgttaagagggaagttgggatcgatgacatgttcaactttgagacctttggcaacagcatgatctgcctattccaaattacaacctctgctggctgggatggattgctagcacccattctcaacagtaagccacccgactgtgaccctaataaagttaaccctggaagctcagttaagggagactgtgggaacccatctgttggaattttcttttttgtcagttacatcatcatatccttcctggttgtggtgaacatgtacatcgcggtcatcctggagaacttcagtgttgctactgaagaaagtgcagagcctctgagtgaggatgactttgagatgttctatgaggtttgggagaagtttgatcccgatgcaactcagttcatggaatttgaaaaattatctcagtttgcagctgcgcttgaaccgcctctcaatctgccacaaccaaacaaactccagctcattgccatggatttgcccatggtgagtggtgaccggatccactgtcttgatatcttatttgcttttacaaagcgggttctaggagagagtggagagatggatgctctacgaatacagatggaagagcgattcatggcttccaatccttccaaggtctcctatcagccaatcactactactttaaaacgaaaacaagaggaagtatctgctgtcattattcagcgtgcttacagacgccaccttttaaagcgaactgtaaaacaagcttcctttacgtacaataaaaacaaaatcaaaggtggggctaatcttcttataaaagaagacatgataattgacagaataaatgaaaactctattacagaaaaaactgatctgaccatgtccactgcagcttgtccaccttcctatgaccgggtgacaaagccaattgtggaaaaacatgagcaagaaggcaaagatgaaaaagccaaagggaaataaatgaaaataaataaaaataattgggtgacaaattgtttacagcctgtgaaggtgatgtatttttatcaacaggactcctttaggaggtcaatgccaaactgactgtttttacacaaatctccttaaggtcagtgcctacaataagacagtgaccccttgtcagcaaactgtgactctgtgtaaaggggagatgaccttgacaggaggttactgttctcactaccagctgacactgctgaagataagatgcacaatggctagtcagactgtagggaccagtttcaaggggtgcaaacctgtgattttggggttgtttaacatgaaacactttagtgtagtaattgtatccactgtttgcatttcaactgccacatttgtcacatttttatggaatctgttagtggattcatctttttgttaatccatgtgtttattatatgtgactatttttgtaaacgaagtttctgttgagaaataggctaaggacctctataacaggtatgccacctggggggtatggcaaccacatggccctcccagctacacaaagtcgtggtttgcatgagggcatgctgcacttagagatcatgcatgagaaaaagtcacaagaaaaacaaattcttaaatttcaccatatttctgggaggggtaattgggtgataagtggaggtgctttgttgatcttgttttgcgaaatccagcccctagaccaagtagattatttgtgggtaggccagtaaatcttagcaggtgcaaacttcattcaaatgtttggagtcataaatgttatgtttctttttgttgtattaaaaaaaaaacctgaatagtgaatattgcccctcaccctccaccgccagaagactgaattgaccaaaattactctttataaatttctgctttttcctgcactttgtttagccatcttcggctctcagcaaggttgacactgtatatgttaatgaaatgctatttattatgtaaatagtcattttaccctgtggtgcacgtttgagcaaacaaataatgacctaagcacagtatttattgcatcaaatatgtaccacaagaaatgtagagtgcaagctttacacaggtaataaaatgtattctgtaccatttatagatagtttggatgctatcaatgcatgtttatattaccatgctgctgtatctggtttctctcactgctcagaatctcatttatgagaaaccatatgtcagtggtaaagtcaaggaaattgttcaacagatctcatttatttaagtcattaagcaatagtttgcagcactttaacagctttttggttatttttacattttaagtggataacatatggtatatagccagactgtacagacatgtttaaaaaaacacactgcttaacctattaaatatgtgtttagaattttataagcaaatataaatactgtaaaaagtcactttattttatttttcagcattatgtacataaatatgaagaggaaattatcttcaggttgatatcacaatcacttttcttactttctgtccatagtactttttcatgaaagaaatttgctaaataagacatgaaaacaagactgggtagttgtagatttctgctttttaaattacatttgctaattttagattatttcacaattttaaggagcaaaataggttcacgattcatatccaaattatgctttgcaattggaaaagggtttaaaattttatttatatttctggtagtacctgcactaactgaattgaaggtagtgcttatgttatttttgttctttttttctgacttcggtttatgttttcatttctttggagtaatgctgctctagattgttctaaatagaatgtgggcttcataatttttttttccacaaaaacagagtagtcaacttatatagtcaattacatcaggacattttgtgtttcttacagaagcaaaccataggctcctcttttccttaaaactacttagataaactgtattcgtgaactgcatgctggaaaatgctactattatgctaaataatgctaaccaacatttaaaatgtgcaaaactaataaagattacattttttatttta

SEQ ID NO: 2 - DNA, 33620 bp, Homo sapiens
tctcggctgccgctgctgccgttggctcttattctcctcctcctcctcctctctcctcctctctgcttctctctgctcctctctcctcctctctcctcctcctcctcctccacctcctcctccttctccccctctttctccccctctttctctcttctttctcccccgtccccccgccccctccccccaggcctgatgagcaggtctcgagcctccatccatcgggggagcatccccgcgatgtcctatgcccccttcagaggtacgtggtggggggagggggagggccatatggggggcaacagggggaggggcagggggcgggggagagtcggggccgagggaagggagcggctgaaatggagggagaggggaggaccgggaaggcaggggtgggagcaaccgggaaggagggattggaggccagagggataggggtagataagggatggaggggccaggaaatgggccttgaaagggggctgaagggaaaatgatgaaggggaaagaaagcgccagaaaggggtgggaaggtagaaggattgggttggggaaaaagctgcagaaataatttgggggtgggagctgagtgatgaggaaaacatcaaggaaatagagggacagagtcttgggagaggggctaggaaggagaaatgaaaacataggggtgaaaagagaagccaagaagatgtggggggataatttggtgggggactcagagtatggtaaggggcggaaaaagagaggaggatggagggagagaaggggccagatggagagagagggaggcagtggggggtggggggatggagggtccagatggagggaagagagaagagagagggaacggtgggggaggggagaccagggcagggggagggccaaattatgtgtgcttgggggggtggcagtacaagtaagatgaaatgatgggagtaggggacaggttaggatcctgccccagactctgaccctcttaaaggctcttgaccagtaaaatgtaacctctggggtcttaatgctgtcttcacttcatcacttttacccccttcccccacccctccaatccttatttccattccccctccctcctctgctgtccatcacctatatctttccccccatatggtgtccgttccttatatgagtcccccttctgtccttcccctatatcagtcccctctctggtgttcattgcctctctcttatctcttttctatgtggtcgctcccttatatctctatcacttctttactagtccgtcttgaccccttctcatagcctccgcattaggtctgcctcctttgctctgacacatgtccagtcgagcccttcaggtgtattcccttgcccctgggcatttaccatcatttctgcctccttttctatctactcctattatttgtctcccagaccattccttgtcaccacaagtctgtgcctacccactttcccttaatacctcaactcttattatcatttctcttttcttgtctcctctacttattggggtgttggagatttggggtacaaagacacaggttttgatgattagaacaagggatccccatctcagcccttgagggatttctcatcctagtaaaaatttcccgtttctcagccatgttgctctgcctcttgcatctgcctcccagaatcattcttcaccaagtccagacagtatgtgtgtgtgtgtttctagagttgttcctaagttccctgctgccaggagaaagatgccctctgaagtctaacccgcctcccttggctgcagcctgaaccagccctttccccaaatgcttatgtgtatcaacagatttctcctctgggtataccaagtgtctaagtgcggtgggcatgttgcctgcaatgtctgtagtttcagaggctaggtattggtgatctctgtatctagagaacattagttagtctctgagatgggttgagatagagtttcaaagtatgtggtttctaaatggtggacattctgagggttcatcgctcactgtgatctggaggttgggtaaatttgagagacatatttatagacagaaaagggctgaatttgcaaaactctgctactcagtgcattctgttggaatgaagctcaaagaccagttctcctgcagtatactcatggttatcccataaaggtgacagagtttgatcttttttccatctaaaatctgataccttaagcctaatttctagctctttgctgtcgccaatgtgacatctctcttacttcaatagggcctgtgtggcattggggtttaaaggagaggcagtttgcagggagagcggcatggcaagaacaacagagctggggaaggaggaccctggtctcatctcagccataggcgacacttggtctactgttctctcttctcaaagttttgttcccatctccagctcttgtctttggaggcccctctgtgtcaccaggcctggatattccattctttccccctgacatctttcttcctcaagctcctcactgtgccttgagaaggctcctgacctatggagtggcttccatcctgtccactgagactaggtggggtgaggtggtgggggcagtgttgaatctctgggcactgaatgggagaagagataaatttggtctctacttgtccaaacaagggcatatttcccaccttctgccctggggcctccacagccagatgccgacaaaagccatcttctccttaccaccagaagaaccagaactttccctaaaggatgagcagggttgaactaggggaggagggcacagaggagggaagagttgggaggggaggccctctcatgtctctgactgtgaacaggtaagctccccgacttcttcttttctagatatttagccctcagaatctcatgatcccaatgttcctacacacacaccccatccttctttcccacagccatgtagctttcctcatactcttttatagaggggtggtgccaccttccaagtccttgtcttctgcagctatttggatgccttcctctacccagatatctgacaccaacttctctgtttttctcctgccaattttgcggcacctctaccttattttcctgaagtagatggagagctccttcatctttctctgcccccaaacgtgtaccttctctgtcatataattcccatccctgaacctctgcatttcttcccccaagtctccagagccttctgtgatgtgatcctctcctcttttcccctttgtataaatgcttgtcttgtgttcctttagagttgccaggtgtctcactttcaactgtgatctcctgaaggccggtagggtccccttctcactttgtggactctcttcttgccattttaggcctctgcttccaaatgcatagagcctcccttactgtttctgtgtgtctctgtcctccagatgtacggggaccctctatgcaccgaacccaatacgttcattccccgtatgatcgtcctggttggaaccctcggttctgcatcatctcggggaaccagctgctcatgctggatgaggatgaggtgagtgtggtgagaaggctgggaaaacgcatgtgggagaatggggagagtcctcattagtgaaggggagagagacacaaagaaggcagacaaagaagaaacatttgcaaatggcaggagggtggccattgagacttgggttggagtgtgacaagaggggtagtcattctctcatcttgggcagggagtctttgagggttatgagctgtgttggggaggagatgtggttctgaagatttcgggggtggggaggctcctgttttcacactgtccatattgtaggataggttagaatggggaaggggaactgaagggtttggagaaggggtgaagacatggaaggccctcccaaccaaagcaatcctcaggacccctctctgctttgcccactgagcaagactcccagtcctttctccatcagggggcagagtgcaagaagagaaattgcaggacgcagagaaaaggcaggggatagaggaggttttaggtagctggaggatactgggaaagaagactgaggtcagtggatcttggcatgatggggtgaagactgggagagtgattgagatcaaggtttagagagacactgagagggcttctgcaagggagtggttggacatcaggaaggaatataagggaggggaactgggagtatgtggagttatctaaaggagtacaagtggagtaggggcagggactagccagagtaaaggagatgaaacggacagaggcctcttatgggaggtggtggccaggtatggagatctgagagccagggaagtgtgggttctgatttgggagctgggtcagcaggagtgtccattggaggaaatagaggataaaaactggaatggtgccccacaagtgtgagtcagggaatgggggtgatttgggggacaagctttaaaaaatggtagggtagcctggaaaaccaaacgtggtgagagatggaccctgaaagttattgggaatggtgtgatgaggaagggttagaatttgagtcagggctaactagagtgtcaagggacctatgggggcaggtgagagtgtggagagatggctgggtagacagcttccaggccacagagtaaagtagaggtgttaaggagaggatatggtgactttgaaaggagaggtggcttggggagtctaagttttggacaccattgggagacatttgagtgactgtggtcaaacccctagatcaaggtttggagtctgtaggagaaatgggggaaactggaacccagagtggggactgttatagggatgaagagggaagacaatggattggggtaatgaaggaatgacagagatagggacagactgaagggaccagtggccagcaagttgaggggcaataggaatggccggtctggagcaggaagggcgtgtgtgtgggaggaggagtagatagaattgggaaaatgagcagcctgaacagacgcagggagttggaattggatgggtggtggaactggggctgggggatagtgaggggtctgttcctgtggctctttgtagaggtggaggagactgcaggggtggaggtgtatggaggtagggatggaggtggacagggggagctgggtgtgaagcttagggaaaggtgatggctgaggggaagaagggaactgagagatgctgggtcgggtgatggaaggagatgaaaggtgggggaaggtgaccaggccctctggcgggaggggaggttgggtcccagtctggccgcaagccgggccgtgggagggagacaagctgtggatcctgattataaatgcagcttctgctacccccgtgacaggctcggagggagagaagggggtaagggaggtgggaggttgggaggaaagcagggagaatggaggaactgaaggtcaagggaaaactggattcaggaagtagctaacttctgaggagttgcagaagagctgagtagggtttgggagaattctccggaaggtgtttcaagacaaatggagggagaaaagagggtgggacggcaaagaatgagagagagagactgggggagagaagggagagatccagtcaccaagtgtggaggggccggggcagaaaaagtgggcaggcttagggggaaaaggaggcccgcccttcctgggaggaggcggaggggggaagagggaggggaggggcggcgtgggccagggaggtctgacacacccccacctcccctagatacaccccctactgatccgggaccggaggagcgagtccagtcgcaacaaactgctgagacgcacagtctccgtgccggtggaggggcggccccacggcgagcatggtacggcggccgagcaggctctcatgacccggacaggcgcggggagagggctgaagatggaccgggctggcggggcgggggcgtcggggagcggcgggagctggccgggggcgggagaaggcggagacaaagtcttgcttcccgaggggagatggcgccctcctctggaaggtggagcgggacaggggctgtgggtgagaggcccctgtgggtcctcgctcggcttcgctccctttctcctctccagcagtgaagtttgactattttcctggtgcttgtaaaaatagtctccttagatctttagcttccagtccgtgtgttcctgcccctgcccctcccagcccctggtctgggatcttggaaagaatgacctagttcctgccctccccccagacctcttccccacccctatgctcctgattcttcttccggaccttcagtccttgaggtctccttttattaccccctgttttctcctctcatcagctgcttctattttctgcaattgtatcaccctttctctttcctccctgatttctcttattttctgtacccctcttgattaccccgtccctcccctctgctcccggcgaaagtccatcagactcccatctcatctcctttctgtctgtagagctatctgcgcggtctgtctctccaactctctccctctctccatctgtctcttcccctccctccccctttctgcccccccaaccccctctttagtcatttaaaaaaagatttttgtcttcctgagaagttcgcttaaaaggtttccatgggaacagtgaggggagatgaaggcagagaacagagatctgcagccaaggtgcagagagacgccctcagcccccggaaaccccctcgtcactgcccccttccacttcatttcccttcccggacctagcgatccaggttccccattcctccaacccccaggtgacccctttttcccaccagctccccctcccttcaggaattcaagctaccagtttctctcccttagagagccagtgacctgtccccatcctttggctccttccagccttctgataggtccaggccctactagccttgtgggccggtttggggaccttgggtgggtgggtgggtggtcagggatgtgtgtcattgtcatggaaaccccataccatcggggtgtgtgggtagcacatctctgtgaggcaaagtcaggtggtggtggagtgtatacagagaatgtgtgtgatgtctgtcacatctgtgtgtatatgtatatgtgtgtatgtcatgttcatgtctggggaagatgtgtgtgtttgtgtgcatgtgtgtacacctgcgtttccaggccagaatggtcacatgctcacagagcatgtttatcatgtgtcctgtggttggcagatctgcccacttattccccatctttctccttatcctgagtcctcagggtctaggggtctctggcgggggtctcccgtgtgttttgggtggggacaccgtgtgtgtttggagttgaggtggcatgtggaggttgctgtattggggttcagtaggggctgggaggggttccaggggcatatgtatttggggggagggcttagtgaaagttgatgggggtgaacgtttagggtcttcaggcagacatggaatgtgtaaagggcatggaggatgtgcagtggacataggggtcgttgggaccttggggacttggcaatgccaaggtgtttgctgaggctgtggactctccagcccgggagaggtcgccggacctttgaggggcattggaatcctgggctcctcctctgctgggtggagccgcgaaccctcgttctctccgcggttttgtgtgtgtgggggggtcctgctcaggaggggatggtgggtggcctggtttgttttgggggtccccttgcccccctcccccgtctctctcgcgctgtctccgggcgacagggctcgtgacagaggcggccacggcagcagcggtcgcctagcaacggcggcggggcccgggcaacggcggcagcggcgggagcggcggcggagggagccgttcccgcggccgtcaccgcgcggccgtcccggccgtcccgggccccgccgccgcccccaccgcgccgggcggcgcgagccgggccgtaccgccccctctccctccgcaccccgcccttcccccgcgcaggggcggggcccctcccccaccggggacacccctggcccccccggggggcggtgcgaggtaagggcggggccgggcggactaggagcgcgcgtagaggggggggcgccgcgcgcgtggggcgggggcgcgcgtgtgcgtgggcgcggggaggggggtggggaagccgcggtggcggcggcggcggcggcagctgctccctccgcatgttctcgctgcatcttccgagtggggggagttatggtaaccggagggggacagcggaggacgggagggtcggggaccggcctcgtgcggacagggtcttgagcacgcgggggcggccggtgtgtgtgggatcttggagcccctggtggaaggggcagcccgtgtgtccgcgtgtgtgttcgtgcccatgctcgtgtctcctgtgtgtcggtgccatgtgcacacgggggcccagttcctcgtgcacacatgtgcagccatccttgtgcaagtgtgtcctgtcttatcttgcctctgcctgtttcctgcctagggggctgttgggccagccacgggcttgtggggcagtccgcggccttgctggtccatgtcacctctgaccctgagcatgcatatccctggctggggctcacctcctgtcaggcttctgtgtgtgggaatgtgtggccctatgagcaggattttctgtgtccctggtggcaggtgtgtgtctttgcatgtgtgttccagcactggcctgagtatctgtgtcaatcccagcatgggtgtccagggcgtgtctggatgtgggtggtgtggctggggggagtaagtgtgtgaatgtgttccttggaattctactgtgtatgaaacacctttgggctgggcaggtgtaagccctgcttggtcagtaagtggggacagaaaagcttaaaaagggaagaaatggggtaaagaggaaaagtggggaggggataggagagaaggaatgagagaggcttgaagaagagagcagagagcagcaggccagggagaaagaatagctggagaatgggaatgtgggagaaagccaagccagacttagaagagagaacaggggataagagcttaagatggggaactggatagagatggtgggagaagaaggggtctgggagctggggaggcagtggggaggagagagtcaggccttctggtaaagtgatctctgaaagaagaaagggaagaagatgggagaaggcactggattcttgtaggccttgcaggatcaggcttggttttggatcagggaaggccactcaggcatacgggctggctcacagtgaggcctgtcatagcagggactgtcattagaggttcatatccccagcacagagctctgtctcccatttctctgctctgtgtccaaccctgttcttcgcccttctctggcaacctccctcctctggctccccttgagagctgccagctgggtgtggagaggaagaaaggccaaagggaaggttagggatttggagggcagggggagattctgtgggtgatggcaagattagagatgttggaggggcaggagtccaagcccttgctgtgtgtgtgtgagtgccattgtgtgtgtacacagggtgtgtacatgtgtgggtgtgtgcacaatgcctgtgttacgggtttgtgtaggtggctgttatgtgtgtgcatgcgtgtatacatcgtgcaggcatgggacatggagacccaggatcacagtttgtgcttttcaggtttgctgtgtgtgtgtgtacacgggtgtgtgttgttttctctgtacatgtcactgcatgcagcattaataacaggatgttctgtgtttctgtcactctgccccccctttcctctgtgtttctgctattcttttcctgcggcaacaaaagtgtttaataagcatatgtgtatgtggcctctgtgtacctgtgacttatgagtgagttcatggatcttagttcttggtaatatgtgtaaggttatattacttccaagaaccaagcaagccaattagcaaatttgttcttctgttaatgctttagttccaaagcggaattttaatgcatttaaagttagactttatgcctttattagatgagcttgcacatgaaaataatggctgagctcggttccctgaaatgagagtgaggcagccatacctgagaaatgcagaaaaaatgttactagggaagagatatcctgaaccattggatgcattgcttagtgtgtaccagaaggataattaacacatttgctcctggtttttctttactctggtggcaatctcggatgcctgtgttagagtgagagaagggctgggggaggaaagggggttgtcctgagacagagtggatgtggttgtacttttcacgtgaatgaaaggatgtttgtgcttctgagatatggggatacctttctgtggtcaggatcatggtgtactcaagcatgtatttcaggggttaaactggaattcccctgcatggggatatgtgtgtcttagggttataggtccatttctgtagtgtgctgtccacatgattgcccaagagacttgggccacaaagtccacaccagcagctctcatgtgggtcactgggttcaagtatgtactcccttgttgcagagctcacatatgtcaaagcatgtatcctgtggggtgtgtgggcctcagggtctcagaatgtggatccgtgctatgcccgtgctcacagttgtctgtatgtctcaaaagcacatagatccccagttatttttctgtattgtggttctcatatacacgtacctccatagctcagtatatgtttctgtactatacacctgttcctgagggagtgatagggttctcgtgtcatggggtccacatttttgtatgcaaacctcctaacacctgggttttacaggtaaagggaagctgaggactgattctagggcagtttgcaggcaatttgcaattctggaagcagacagtgaaaatataattgtggtcctcccttgttctgttctggaacctagagggttaacaggcagctcttccggtccacccccctccttccagcctgtagcttcttgttgccgtggagatggtggccccgccccgatgcagcacctgcccccccattggctgcagtggtgactgtggggctgaggggggagcccaggcctgggcagccattctggagctggagccggagcttggcatccccccacttacattctcttccagcccctcggcccctctaaattcccttgcagccgagcctcagcttcctttttcagcgcttgccatccctctaggctcttggcagactgagctgcatccgcattcacctcccctcctcctcctttccctatccttacttgggagtcccgagaacccccactgtccatccttcctgctccctgcccattcccctgcattctttgcttttcccctccccccaccaaccttctgagcccctgccactgcagtgcacgtggaaccggctccttctcccttccccccacctgccccttccttggattttctgtccccagcttctccccctgctactcttcacaggtctcttccaagacctccccctccagtccagggagggggtcatgggaggcagccctggccctccagacagacaggggttccaggaggtggggggcaggtggaagatgtgcccaccagggggaagaggaaagcctgcctatgggcaatgacctttaacccatctttccccccagctagccccttctggggtgggtgggcaccagggacctagcctccctggatctttggtgtccttcattactggggttttactgaccctctcagccatgctcccctgctgactgccagccccagtcatgggcctaaggcctcccaccccatccccctcagggggctcctgctcaggttccttgccccctccttcccgctgccagcctctccgccgtcgctgctcttcctgctgctttccggggggtaggtgaggccggagctgaggggcagagggaggtgggggcatgcactggggtcaggggtgggaacctgggttaacagcttcccttctggccccctccccaacttcccttctggccatttcctcccctccagaataccacttgggtcgctcgaggaggaagagtgtcccaggggggaagcagtacagcatggagggtgcccctgctgcgcccttccggccctcggtgagtggtgcctaccagatgtggctcagttgggccccctcccctccagccccaactggggccctaggagtctgagaaagagggcaggagggggagagagggagtgagagtgagaaaaagagtgtgtgtctgtgtgtgtctccccacctctttggtttcccccttcttggctctgcccccctgcttctgagaccagccctcccaccttctccaagctgtgtgtgtgtgtatatgtgtgtgtgtgtgtgcttgcactgtacccgtgggagcaaggaagacaaactggtattagggttcctatccccctttcctcgcctctggagacttcccttttccccatcccactttcatccaggggctctctaccagctgagggatgagtaggtagaactgaccctgccccaacccaccccatccccatttcccccccagcaaggcttcctgagccgacggctaaaaagctccatcaaacgaacgaagtcacaacccaaacttgaccggaccagcagctttcgccagatcctgcctcgcttccgaagtgctgaccatgaccggtacaggggctggagcatgtgggatgagattgatgtaatgtagggtctcctgtgtgagatgcagagggagggggttatctgtgtgcaaaggttgaaggattcaactcaagttggttgggggatgtcatggcacaggggacagaacagaaaagaactagaatagggatctgtgagcagcaggagaggggtagggtggcagagagaagacagacagacaggctggaaagggaatgaaggtgaagccaaggagggactcctcagggactcctcaggccaagaaggatgggctctagcccaggatcaaaggagctgtacaggaggagagtgaccctggaggaatgtttaaggaatgcagggaaggggttggtaggtgagtgagcaataggctgtaggtggaagggtgtcagggaaggtcaggaaatacaggggcagcaggttggagtggggctgggggtggctgaatgaatggatgatggctagggctcaaggacctcatcagtgagggaagagacagtatagagcatggcagagaaggggaggctgggacaggtgtgcagggtgacagaatgggaagcaacccatggactgaggcatgaagaagcagccagcggagaagtccagaaggcactgtccctgagaccaggctgaaggagacctccactgtttgcctttgttgcctgccatttggggttcctctctgggtttccccctcacccagtcactccccagggagaaccatgccctccctttcccccatgtctggccacccccaggattgggcaggtagggaggttgggataaagtgagtcacacctttccctgcccccctcccatgttgccagagctggatttggggccggcagggggtgagggcatggtattcctggccgcgggggcgggggggggggtccgggggccgggggagcgtcgcgctgacggcagccagagcctgcgatgacggggctgctataaataacttcttggaggctcccacacccaagctcccctcccgctttcccactgctctctactcttcatcccctgcccatctccataccgcttttgtattgctatcctacccctcattattccatgcccctagccccctttatcttctgccctcctgcagtgatttttttgcattccatcccctcttagccctcacctcggttctcccggccatctctccagttggccttcctcctcttctcctgtcctctgtcttgctgcacatacctttgtctccccctttcttcttcttgccctacctcctcttcttccctagtccgtgtattctgtcttttatcctctttgagctcttttctgcccacagctttctcctatttcttatgcttttccctcactctttcccctgcttctgctaaaacttgtcctcttatgctgtgttcattcattctttgaatcattaaatgtttatcaggcactagccgtgtgccaggcccaggctagacatatctcttctctgtgccttcacttctttacttccactttttcctttatactgaggctctggtttctggggttacctggaggtactacctagaagtgccccaggcccactttgttctctccttttttttttttcttttctgccatggtccatttctgggttgagatatttctagatgtccccagtcctcgcaatcccttaggtgtgagatggtgggagtttcttttttttcctttttttttttttaaatagaaatagggtctcactgtgttgcccagactggtcttgaactcctgggctcaagtgaccctcccacctcggcctttgaaatgttgggattacaggtgtgagccaccaggcccaggtggagcaggggagttccttaaaggattctgatttttctcacatccctcacgtccttcctgataggcagggtttctttctgtgtctgtttgggaagggtgttcagggggccttctctccaagtctccatcctggaacagactgatgatgcagggtacctatgtgtctaagaagagtaggggggccgggcgcggtggctcatgcctgtaatcccagcactttgggaggctgaatcacttgaggtcaggagtttgagaccagcctgaccaacagggtgaaaccccgtctcagctaaaaatacaaaaaaaaaaaagaaaaaaaaattagctgggtgtgctgaggcaggagagacgcttgagcccaggaggcagaagttgcagcaagccgagatcacaccactgtactccagcctgggcgacagagcaagactgtctcaaaaaaaaaaaaaaaaaaaaaaaaggaagagtgggaagccctgatcccttcctctcctgaacctcctgcctgccagggcccggctgatgcaaagctttaaggagtcacactctcatgagtccttgctgagtcctagcagtgcagctgaggcattggagctcaacttggatgaagattccattatcaagccagtgcacagctccatcctgggccaggagttctgttttgaggtactgggtctggtgggctggggagggccaaaggacaggggtgatggaaggtggggggcagagaggtctagagaaagtggcacaggtggggacatcaaggaaacagaaacttctgggactggaggaaagggtaggccagggaggaagagaaggtagcagagtctcctcccctctgtagccctttccctcaactccacactcctttctaggtaacaacttcatcaggaacaaaatgctttgcctgtcggtctgcggccgaaagagacaaatggattgagaatctgcagcgggcagtaaagcccaacaaggtattggggaataaaggggacacaacctgtgcagggcaaaggttgcaccaacacgggaagctgggggcctagggaggaaagtgagttaaaggaggagaggcttggggaaggagaggattgaggtacagtgtatctggacaagcagggggagacccccattattctgagtcccccatttcttttcgctttctgtactgctaccctgccttacgatctctttccctgccatagaagtcatagacttacagagttgatggggctctggaaattctttagtctagcttccctgcaggcaggaatgcttcactaataccccgcaggacacatcaaatacacttagccaagtttctgtaccttggtttcctctctaagacagagggaactggtggcaatgggttggattaaatgatctctaaggtccctttggcacataaattctatgagtctgttcttcccaaaacttcatgcttccagttctgtcagctattctctgtatcccagtttctagcaagcttacagtcctagtcacactcctctggggggaactcttgtgtcttgatgtccttaaagaactcaacccaagatgctgacatgatctgacctatgcagagtacaaacaccatgttccctttcaacacactgcaatatcacctgagccttaccattagcttgtgctcaattgtatccccccaggcccttactgattcttttttttttttttttgagacagagtctcactctgtcacccaggctggagtgcagtggcgtgatcttggctcactgcaacctccgcctcctgggtttaagcaattcctgtgcctcagcctccccagtagctgggattacaggcatgcaccaccacacccgactaatttttgtatttttagtagagacgaggtttcaccatgttggccaggctagtctcaaactcctgacctcaggttgtctgcctgcctcagcctcccaaagtgctaggattacaggcatgagccaccacatctggccaagctttacccattctatatgcaattcttttttcacaatttctgatagtctctgcaggactttccagttcccttcaaattctacattaatatttttggcttgttattccagcttttgaaatctttccaatactgtttgtgttgtctagtgtatgtctacgcttctacagtagcttcctggggctgctataacaaactgctacaaactgggtcacgtaaaacaacagaaatttattctctcacagttcaggaggctggaagtccaaaagcaaggtatcagcagggccacgctctctttgatgctgtagcagggaatccttccttgcctcttcctagcttccggaggttgccagcagtccttggcattcctgggcttataactgcatccgtctaatttctgcctccatcttcatgtagctggcttccttctgtgtgtctctgtatcctgtatctctgtgtctccaaatctccctctccatataaagacaccagtttttataaggtgggttaagggtccactctaattcagtatggcctcttttttttgagatggaatatcgctcttgtttcccaggcttggagtgcaatggcatgagctcagctcactgcaacctccgccttccaggttcaagtgattctcctgcctcagcctcctgagtagctgggattacaggcacgtgccactatgcccagctaatttgtttttgtatttttattagagacggggtttcactatgttggccaggctggctcgaactcctgacctcaggcaatccacccacctcggcctcccaaagtgctgggattacaggaatgagataccatggctggcctcttcttagtttgattacatttgcagggatcctgtttccaaataagatcacattcacaggttcagggtagacatgagttttggtgggatactattcaacccagtacaccgtctcaccttatgattgctgtctgtatcccactttcttactgtctctcctcttttggtgtctctctgtcccttccccctttaacatcatgcccaccccaccatgccaggacaacagccgccgggtagacaatgtgctaaagctgtggatcatagaggcccgggagctgccccccaagaagcggtactactgtgagctctgcctggatgacatgctgtatgcacgcaccacctccaagccccgctctgcctctggggacaccgtcttctggggcgagcacttcgagtttaacaacctgccggctgtccgtgccctgcggctgcatctgtaccgtgactcagacaaaaagcgcaagaaggacaaggcaggctatgtcggcctggtgactgtgccagtggccaccctggctgggcgccacttcacagagcagtggtaccctgtaaccctgccaacaggcagtgggggatctgggggcatgggttcgggagggggagggggctcggggggtggctcagggggcaagggcaaaggaggttgcccggctgtgcggctgaaagcacgttaccagacaatgagcatcttgcccatggagctatataaagagtttgcagagtatgtcaccaaccattatcggatgctgtgtgcagtcttggagcccgccctgaatgtcaaaggcaaggaggaggttgccagtgcactagttcacatcctgcagagtacaggcaaggccaaggtgagtgttgtgccctcagggaaaggtgacttgggaatgggcacttgcttgggggttagtgaggacagggcaaattcacgagattgggttgtgcagaggctgacacttggattttcctgggcctcaggacttcctttcagacatggccatgtctgaggtagaccggttcatggaacgggagcacctcatattccgcgagaacacgcttgccactaaagccatagaagagtatatgagactgattggtcagaaatacctcaaggatgccattggtatggcccacactcaggccctcttcttcccaaacctgccagatgtccaccccagaccccaagtccacccttccacagcttgatacttcctaacccagagtcctaggactccagcctccaacacctgattctgaaatttccccaaccctggccacccccttccctgcccttggaaagtgtgaccacaccctcttgtgcccccaccccccaggagaattcatccgtgctctgtatgaatctgaggaaaactgcgaggtagaccctatcaagtgcacagcatccagtttggcagagcaccaggccaacctgcgaatgtgctgtgagttggccctgtgcaaggtggtcaactcccactggtgagactgggaacgctgggctggggggccagggtcgggggaattatgtgttcatctgttcatctatctgtccatcctcaaagaggactgagcaccatttatgggcaaagcattgttctaggcgctatagagcaaacaggtgaaagaggcctggtccctgccctcagagggcctccaccagaatggggacaaattagaagaaaaaaaaaaaaagccacagagccataatggtgtgtaagtgctgagtaagggtccccccaacctctgtgtgacataaggtcagagagaaggcagagctttgagataagtggggaagaggtgcccccttgggtaggctttgaagactggtttaggttctgatatatggacatagttggcaagaaagacatttcagaagaaggctgtgagaaaggcacatgtgtgatggtgaaaaggcccaggagttttcaggggacattaaagtaggttagtagcaattacatcaggtttagtggagcatgtgcctcataatggggagtggcgggagagatgtctgggcaggaagattagctttagaaactggaaggcctcaaggagtctgaggtcattggtaggccttgggatgccattaaaggtgtcagaaatattgtgatttagaagattaatccataggctgggcacggtggctcacacctgtaataccagcactttgggaggctgaggcgggcagaccacctgaggtcaggagtttgagaccaggctgaccaacatggagaaaccctgtctctactaaaaatacaaaattagccagatgtggtggcacatgcctgtaatcccagctattcgggaggctaaggcaggagaatcacttgaatctgggaggtggaggttgtagtgagccgagatcacacgattgcactctagcctgggcaacaagagtgaaactccatctcaaaaaaaaaaaattaatccataagtagagtgtatgtagtagagtagagggatgtatgttgggggatgactggaatagagccagctgggggctcggaggcatgaaagtcagatcctgaatcagaacagtgacagaagttaggaaggagctactggaaggaccctctcgggaaaggatcagtaggaattgtcagcttattggaaaggagggagcatgtctgtggggagtcacggatgactcaagaggccatgaggctggtggttgggagaccggtggcctcattgacaaccaggaaagtcaggaggaggagccagttggaggtgtgggggcgatggtgagctctgctttacaccagccgagtttaaggtgtcagtgggacattgaagtggaactgggaggtgcggggagtgagctctgagccattccagggactggggatcatgcctggggcacctccatccccatttccctggaatccagaagagttggggggtccgagctccctgtacctcaagtgaccctccatctctctcccatctctgtctctccctggtgtctgtttttcttctcctcctctccttgtctctctcccacacccctccatctctctcccacgtgtctctcccctcaccttctctccccctccatttctctctccctaatctgtctgttccctctgccatggcccccttcttcaagcagcctcccatcttgctcctgcggtccctccttccctgtctctctcacccctgtttccacaccctcacctcctaccacccccctcagcatgttccctggaagctgagggtctctggggctcagtcccggtctctctctttctctctctctctctctgtctccccgacccttccccccagcgtgttcccgagggagctgaaggaggtgtttgcttcgtggcggctgcgctgcgcagagcgaggccgggaggacatcgcagacaggcttatcagcgcctcactcttcctgcgcttcctctgcccagcgattatgtcgcccagtctctttgggcttatgcaggagtacccagatgagcagacctcacgaaccctcaccctcattgccaaggtcatccagaacctggccaacttttccaagtgagggaagcttcaggagtgggcagggcagggagtggcagggcagggagtggcagggctgggggtcggcaagaagggtctcctgagtccccagagatcctgagatggggaggctatgataccttgtgtgtgtgtgtatgtgtgtgtatgtgtgtgtgtgtgtgtgtgtgtgtgtatgtgacctttatcttctgcattcttggctaggtttacctcaaaggaggactttctgggcttcatgaatgagtttctggagctggaatggggttccatgcagcagtttttgtatgagatctccaatctggacacgctaaccaacagcagtagctttgagggttacatcgacttgggccgagagctctccacactgcatgccctactctgggaggtgctgccccagctcagcaaggtcagcagatcccctctttgccctatccccagatggctccagaggttcctggagcctgagaaactaccctttgaagattttttttctccccttgtttctcgaggtgtcaccactactatcccaactcaggccccctccacctgcaccctcagaggccctcttagagctgggcactgagcccccaggtaacagcctcacccttccaggaagccctcctgaagctgggtccactgccccggctcctcaacgacatcagcacagctctgaggaaccccaacatccaaaggcagccaagccgccagagtgagcggccccggcctcagcctgtggtactgcgggggccatcggctgagatgcagggctacatgatgcgggacctcaacaggtgagcaccctgggacagccaggcctgtgccctaggagcccttctcctattctagatactcctcactgggccccacatgcatctctctagggcttgaaagaagggaggaaaaagcaccaagttctcaggggagacgataaggagacaggtacagtcagtggtaggctgagagccctttacagcctgagggagtgagagatttggagctctaggaatagggctgaggctccaccaactcacggcttagttgtaagcctagagcatccctgctgcaagctctgatttgctgtccctctgcctgcccatgctagtccccaggctgaggttcagccagcatgtcatgtcagccatgtgtcaaaatgttcaaacatctcagtaatagctagtgaataagcacttcccccagcccccgaccacaaccccacagacctccccatgatccagcacttagagcagtgacagcagaagcctagcagggcctgcagcctgctccagagtcccagcctccattctgataggtggtgcccgtgcttcatttgctgctcattattttgatgatggccctgctttttcctctgcccgtgtcttcctccatgacaccatacccatcccaccattcccgcctctcctttcatttgtccacatctctctccttctctgtctgtgctcgcccctctttccatctctctccagctccatcgaccttcagtccttcatggctcgaggcctcaacaggtgaggggctctcccctcccccgccctcctctcctctcctgtctgttccctctcccactccactggccttcgccctactcctctcctctcctcctccatggacctcatctcctccatatgtgcccagccctgcccccatcccttctcttgctgcccccatctcccctcctctaggcctcacccccttcccggaggggccctgtcctttccctttactcacctgtcccctcccatcctccctgcctgccctcttcagggctgccaccgctagctctcagcccttccctctgggtcccacttttcaccccaaggcctgtgccagaccacagcaaggttcaattgctaggagccctgaccttaccttctgcttgtgtgcccccttcccttctgacagctctatggacatggctcgcctcccctccccaaccaaggaaaagccacccccaccaccgcctggtggtggtaaagacctgttctatgtaagccgtccacccctggcccgttcctcaccagcatactgcacgagcagctcggacatcacagagccagagcagaagatgctgagtgtcaacaagagtgtgtccatgctggacttacagggtgatgggcctggtggccgcctcaacagcagcagtgtttcgaacctggcggccgtaggggacctgctgcactcaagccaggcctcgctgacagcagccttggggctacggcctgcgcctgccggacgcctctcccaggggagtggctcatccatcacggcggctggcatgcgcctcagccagatgggtgtcaccacagacggtgtccctgcccagcaactgcgaatccccctctccttccagaaccctctcttccacatggctgctgatgggccaggtcccccaggcggccatggagggggcggtggccatggcccaccttcctcccatcaccaccaccaccaccatcaccaccaccgaggtggagagccccctggggacacctttgccccattccatggctatagcaagagtgaggacctctcttccggggtccccaagccccctgctgcctccatccttcatagccacagctacagtgatgagtttggaccctctggcactgacttcacccgtcggcagctttcactccaggacaacctgcagcacatgctgtcccctccccagatcaccattggtccccagaggccagccccctcagggcctggaggtgggagcggtgggggcagcggtgggggtggcgggggccagccgcctccattgcagaggggcaagtctcagcagttgacagtcagcgcagcccagaaaccccggccatccagcgggaatctattgcagtccccagagccaagttatggccccgcccgtccacggcaacagagcctcagcaaggagggcagcattgggggcagcgggggcagcggtggcggagggggtggggggctgaagccctccatcaccaagcaggtaggtgaaggcaggaggaaggcgggctgggtcacaacagggagggaagaaggagatggggggtggggttgaaacagagtctgtggcctgaagttacaatcttcttgcctccttttggccattaaacaaatgtgtatagagggcctgctatgtgccatgtgctatgccaggcactaaggatacggcactgaaccctcttagcactctcattccagaggggattaatccataagtagaatgggggtgactggaatagggccagctgggggcttggaggcatgaagatcagatcctgaatcagaacaacaggagaaattctctggcattcaactcacatctctggcattcagaggtgataaaggctacagcagggcaataggactgggactgtcgtctcctttggctgtgctgttgccctctaaatgtaccctgctttttcccaccttttctttctctgttcgccctcactgtgccttgtcccagcattctcagacaccatccacattgaaccccacaatgccagcctctgagcggacagtggcctgggtctccaacatgcctcacctgtcggctgacatcgagagtgcccacatcgagcgggaagagtacaagctcaaggagtactcaaaatcgatggatgagagccggctggatagggtacgatgggctctaccagctccaagccccagtgtttccttttacccacaggggagatctctagtcacttccaagggaaacctccagggtcagttatggtggtaagaaaaggcaaagacctgatcacctcttgagaagccttccgtccatctggggagaccagatacacacagttgttaaaagtcactttcaactctattttgtaggttatatatatcatagactatctggggatcatctattttaggcttacctccatgttcttccccaggaggaacataagccctggctcctgtgactgcttaggaaaggaaatgttactttactggcagtaggagctaataaattggatggggatggagggggttgcagctatattacaagtgatgtctggcctacccagtcactgtcccatgggcataagtgacagtcagtgggcagggaatgcatgtggtaaagtagtatgtatcagtcatgtgtgaaaagaccatccagaccctcacttggtggaggctgagggcaaagggcaccaagagctctggggctaacacagataacttagcagaaagttacttgaggaagctgttgttcctagggcctgaggaagagggcggctgcaggattaggtcatatataaagaacatatgatcctaacacggggaagtggtctttgagcataggaaatgttgggactgactcagatgggcttgaccagcaaatttaatgagaattaaaccctaatattagccccaaggcagccaccgtaggaagttaattcacatctctcctctgcatgtagaagggttggtgatatatgtatgtatcctcttcagagaatgaggaaatagtcttttgaatcatttttttttctgtgcttcagatgaggaaaccttgttgagaaaggctgtagactagcactatccaatataactttctgcagtgatgaaatgttctgtaatctgtagtgttcacatgtgtctagttgtgattcaggaactgaatttttagatctatttaattttaattttgtaatttttttgagacagggtcttgctctgtcacccaggctggagtgcagtggtgcaaacatggctcgaggcaacctccgcctcctgggctcaagacatcctcccacctcagccccctgagtagctaggactacagggtcgtgctaccatgcctggctagttttttttcttttcttttttttttttttttttttttgtagagacggggttttgccatgttgcccaggctggtctagaacttgtgagctcaagtgatctacctgcctcagccttccaaagtgctgggattacaggtgttgagccactgtgcctggcctaaattttaaatagctacatgtgggctggtggctaccatattagacagcacagctgtagactctagagccaatagggcagataaaatgactcttctgagctcttccagctctggaattcctagattctcagcctagaattcacttgtagacctcctatccttggcaccttgacagagccaaggagagggtcacatggaggacagcacctgcctttcccccgtcaattgccttttcttcctatgtctccagcatgtgttctggggcctggcttagggctgaagagtcaccctatttttaatttctgagcacagttactcaaggtgtgtttgtgagtgtaggtttctgtgtgggtcttcatgaggggccatacatagacctcagggtgtgggagtctgtgaccttgctccattttgagggaacctcagcaccatggcagggtcttctcaaaagcaggtgtgtggatatgatccacaggcagggaaggggttggggaaggcagctggatgtccctcaacatgcagtggctgtgcttggcagacagggatggaggctgggtggtgggcttggggtggggcgcccctcatagtgcggggtcgtgtgcccggcgggcaggtgaaggagtacgaggaggagattcactcactgaaagagcggctgcacatgtccaaccggaagctggaagagtatgagcggaggctgctgtcccaggaagaacaaaccagcaaaatcctgatgcagtatcaggcccgactggagcagagtgagaagaggctaaggcagcagcaggcagagaaggattcccagatcaagagcatcattggcaggtgaggggcggcctggggagggggttgtgagggagagcctgaggctggagagagcaagtgggtgagctactccgctgactcccatccccaaactcaggagcccaccaggagagcccaccactctcctccccaggaagccacccactcactcatcaccagatggagagaaaccccaacctgcttagtgcattaaatatctctttaccaaaccctgacctctcttctgatagagtagcttcggaagcccttggaaaatgtacctgttcctgtccaaccatcactgcatttgcatttaccctaggccagagctccccactagttattctcaacttaacctgtgatgttcactccaaacctaagcagggctccctagccagagtaggccctgcccttcctgggtggaccctccctctctagccttggaaaggtgttctgttagaaagggtcttttagcctgtgtatgttttcagctgctccagcaagtcctgggctccaaagagggtatcctcagcaaagaggtcaattatcttcagagtggtggggtcggggtgggggggaccctgggcgcactccaaccagagccacctccattttgatccattctaaatgtattttatgtaagatttaattagaagaaaagggcttcttgaaatattttttgaaaaccactgctctaattgatatcctttatgataaatcacctcgaggatcttcacagtgaggtgacatgggggatgcagaagccaggtcctcagccatggaaggtctggggaaggggcactgctgtcctgattgggacgatggaggcctggaggtgtctggatggtagaagtctttgaggcacagaaagctgccttagcagggaggtgtaagggttcctgggaggaaggtggagagcatgatcctgaggaacagggagtcttgcatcacggcaatggagggactctgattctaagggataaggatgcctgaggtttttccagagagctatggggttccatgggcaggctctgagcctgtgcccgccactaaccccactgaagcccgtcccttcaggctgatgctggtggaggaggagctgcgccgggaccaccccgccatggctgagccgctgccagaacccaagaagaggctgctcgacgctcaggtggaaattacaatgtcatttatcttctccgtgtcccatccccatccatcccactgtctttcgtgcactcactacaccagccacctagccccatcaccatctgtctctcatagtctgctgtttgtccactggctgctcctggcagccccctagtgaccccatcttcatcccatcgtctgtgcctttgtcactcctggcagcgtcagcccaactcctgtgccttcccatccagtcttcccactcctctctgcatctcaggaccttctctaccagaaccttggtctttctgcccctagaccccacctagttccaagaacccctgccccttctttgctcactcctattcaagccacgttgttcagcttcctctgcgctcttgggccagagggctagaagctgccgttttctggaatagagcacagggcagtatgatctgtagtttctccaggccctggccggtaccctgaaaacttggggacccatcacctctgttctcttggctccctaattttcctgtctccttggcagctcctgcatagcttcctcttcctgactcttcagatcttgaaggccttccatcctgtaacctccctttgccctcagtatttaagtccagcctccctctggcctccctcccactctggccctcagaccttcccagctgcctgctgcccagcctctcttctcacaagccagcttctaggacctcccttctgcacccttaccccttgctttcccaaaattctgctcattttcctacccatactcctctttgctctgactgctaggctccccccgcctgccatccccccaccaaggctcctgaccccatgaccccactctctcccactgcagctcctcatcaggtaattctcctggttccgctttggccacgggcggaggacacagggggaggtgactccggaccactgcaggttggtcgtgaagcccactccctccaacacctccggagcctctcccctctcactgctgccctccacacccagagaacctccacagactccagccctccgacacctgcacagatccatctcccaagacaccacccaaagagagcatttgctgctgcttcccagaactgtccaacaataccttagcaacaccaagagttgggccctagatgggcccagcacattcacaggtcacacccacttccctgcaaaacccaccccctcccagcctcctcctgactctaagccctcctcttcctctacctctccagtgtatgtctgtcaccccccatttcaccagagcgtccttaggggctgggggtgggtttgttaatggggtggaggcaatgatgggttggaggatcttggctataggggctgtgctgactgcagcaggtaggttgggtttccctcttccttccctaatcttggttctctaccctcctttccactcctcacctgattctctctcttcctcctccttatatctgtgaggcagaaggcatctgaagctcatattagcccccattgggtgggaattaggagtgggtagttaactcagggagacttgagataccctggaaaaaatgctattgagatgtcctgacattaggcagggtggatggaacaagaaggagcaagaaaggaacctcaggcagatgttaggacatggacttgatcatgtggcctgggagtttagaaatggggagagacatcctcctagatcagatcgtgggctcagtaggcatgttgattcccagggagaggtgccaggaacagcatggtaaagaatgtactcttcacagctcacatccccaggttgctgatgccactcactccccctctcctgccatcgagtggccttgccggacacatcaccctacctaaaaagccagtaaatgagaacctgtcagctatagccatcatttctgagatgcgattttctttgggattgagctgcagtgggcagtggctccttacactgtaattttaattctctgcctgcccagcctctctgtcaaagtagctggtgatctataaagatgctaaaaggcaccaggggactttgccatttaaaggactcctgcagtgaattcttttgtaaaatgaataatggcaccctaatttatccactttctaaatttgggtccatgggggtgtccagggcatgcttatgtgctgtcaccagcagacaaacagagggaatggaatctgggggttccttccctgctctcccgccatactcaggataccctaccataagtgatttcctctcactgacttgcagaaaatgtgtgagatacccagcaagctaagaaggcagttttgctgggtatctcatacccaaggctggggtttgggtgatctgagaggttagctccttgatcctaggatggaagggagagcttatatagaagcttttacttggaaggttttgtatcctaaggtcagacatagctatattaccaagcctaaatgccatgtggcccaggaaataatttggacatttgttctaaaccacttgtggtaggtattggtctctctgcaactcagccattaattagaaattagttttgagcctgaattttaaaaagccaagtgttgcccccagcccacacacacacacacggacatgtacagtacaaaccccagataattacaacagccaaagagagaaggaagtgaatttcccaaccagaagcgtagggaaattcagatggctttcttttctcccagcagaggaacagaaggcggagctaagggcaggaaccaggagttggtcaaggagctataggaggtgatgagagtagaaccaggggtaggagctggtctggtacccctcaccctctaattgggagcccagggagaaggactgaaaagaagatgggagtggaaaagaataaagccagtttctgcttcccagggatgcagagattggggcatgctgtgtctgcagaagctcctagtcatttccgccataattgtgagagagaggggcagccctcccacaagatttttcccttcccatatcacttccctgaatccccttcctttccccccagtacagttaaacctctctctaatttggaatgttatatttgagaagatggccactgtgaataagtgacaaacggaatgacagtgtctatttaatgaaatgcatgtcttcaaaatatatacagaactcgatgaacaaggctttttccactcctcagggagcatgcattaatgaatagataggattcaaaagtctgttttctggtatgggttaaatatcccctcctacagacatatttccaccactaatttgcttagtacaccttttcttcacagataaaggaaaatgcaagctcagtttttcttcagattatgaagaaattccaaatccacaggggtttggattaatgaggttttgctgtactgcctccccttattcctcaacatgaagttcccacctcggattggggatgggtgggagggggtttcaagaggaggagggtgggatgggcaaggaatatacacaggtgaagccagagaagggttaggttgggggtgcggtgggaacttgctgttttgatctggtttcctggtgtgacactctgggttaaaggcttgaaggcccctgttaggagtctaggggtgagattctcttctctctgatcccagaggacgttaacttctactgcaggtgagaaacaaaataggaggatggtggggactgtcctgggaggagggggtggtccatggcttgtggtgtgggctggctataggggaggccactgctaggggactggcatccaggcccccttgaagcgtctcaataagtccgcgctctcctttttggtgtcttgcaggagaggcagcttccccccttgggtccaacaaacccgcgtgtgacgctggccccaccgtggaatggcctggcccccccagccccaccacccccaccccggctgcagattacggagaacggcgagttccgaaacaccgcagaccactagcccacccagcatcagagaccttctcttcctttcctgtgcaccccaccctgtaacagcaccaaccaccaggattggacatcaccgaggaacagcgggattgcctccccgaatgcctccctgggaggcacactgattgcccacccccaccactgcaccatttccaggagggagagtggggaccctcagccgcccccttttccttcccattggggtgctgccctctctttgacccccagggacccttgccccaggacaccgcctaccccgtacagaccccttcactccggggtgctatccccatcctctgcctcatcgttcccctgagcactgggggacagaccctcacccccaccctgggggtgtggcacctccaaactttcaacttcagggtgatttttttagcagtaaccagagctgacaatctaactcccctccaccgccccattttggcctcccctgccccccttgttatggggaggggaccccgggtgagggggccctattaccccttgatttctcaggagcgtctgggggggctcagcacgcacaaactccttctccttctaccactcttaaatttactccctccccacccagaacccagatggggtggagggggccaccggggcagggagggggcggcaaggggggaatgggagttgtctccccttctccccacacctgatctgctctcggctggtcccagagcggggtgagggggcttatgcccccccctcccccagtgtgttgggtggggtggaattgaggttagggtgaggggtcagggtttaggagggtgtgtatgttgggaggacaggctagttgatctgtcctactctgacacacagtcccctctgccccttccttctctcttcttggtctctactcccagggggaggggggaacttactctaggaaaagccatgtctctctcccccagggtggggggacctgtgttggaggaggggtgttggggggcccccttccatgactctgtcccctgggggaggtaggacagggctgggcttccctctcatcctccccctcccaatctccttccacctccctccctcccgccagctccacgatttttcggtgtttctctgtacatagttttctggcgggataggggaggtaggatggatggggtttggggtgggtaggccatgggaggggagaagcccctccttggcaccccctcttccctgactgctgtcccctacccagccttgcccccttcatccttttgcgtttggtattgagactctcctagactctactcctctttcttttgtatggacagttccccttcagtcccatccccctacacatacacccagccggggccaaatttatacttatataaaagttgtaaatatgtgaaattttatccctgtgccctttccccacctcaggccctacccctggaccctccccaaccttccttctctcttctttggctgttgtaattatctggggtttgtactgtacatatccggggtgtgtgtgtgtgggctgggggcaacccttctgtacagagcttcctggccccctccccccccgcccctctgcttccctccccacccaccacctcaagggtagggagttgctcttcctacctgttttattttgttttctcgttctccctccccaccccactcccagccttatctatcccccctcactgtccccttttctccactcccagccccatttcctttttttctggagtgtgtggtgaaacagaaaaaaacatgtttaataaacggagattgttctttta

SEQ ID NO: 3 - DNA, 33618 bp, Homo sapiens
tctcggctgccgctgctgccgttggctcttattctcctcctcctcctcctctctcctcctctctgcttctctctgctcctctctcctcctctctcctcctcctcctcctccacctcctcctccttctccccctctttctccccctctttctctcttctttctcccccgtccccccgccccctccccccaggcctgatgagcaggtctcgagcctccatccatcgggggagcatccccgcgatgtcctatgcccccttcagaggtacgtggtggggggagggggagggccatatggggggcaacagggggaggggcagggggcgggggagagtcggggccgagggaagggagcggctgaaatggagggagaggggaggaccgggaaggcaggggtgggagcaaccgggaaggagggattggaggccagagggataggggtagataagggatggaggggccaggaaatgggccttgaaagggggctgaagggaaaatgatgaaggggaaagaaagcgccagaaaggggtgggaaggtagaaggattgggttggggaaaaagctgcagaaataatttgggggtgggagctgagtgatgaggaaaacatcaaggaaatagagggacagagtcttgggagaggggctaggaaggagaaatgaaaacataggggtgaaaagagaagccaagaagatgtggggggataatttggtgggggactcagagtatggtaaggggcggaaaaagagaggaggatggagggagagaaggggccagatggagagagagggaggcagtggggggtggggggatggagggtccagatggagggaagagagaagagagagggaacggtgggggaggggagaccagggcagggggagggccaaattatgtgtgcttgggggggtggcagtacaagtaagatgaaatgatgggagtaggggacaggttaggatcctgccccagactctgaccctcttaaaggctcttgaccagtaaaatgtaacctctggggtcttaatgctgtcttcacttcatcacttttacccccttcccccacccctccaatccttatttccattccccctccctcctctgctgtccatcacctatatctttccccccatatggtgtccgttccttatatgagtcccccttctgtccttcccctatatcagtcccctctctggtgttcattgcctctctcttatctcttttctatgtggtcgctcccttatatctctatcacttctttactagtccgtcttgaccccttctcatagcctccgcattaggtctgcctcctttgctctgacacatgtccagtcgagcccttcaggtgtattcccttgcccctgggcatttaccatcatttctgcctccttttctatctactcctattatttgtctcccagaccattccttgtcaccacaagtctgtgcctacccactttcccttaatacctcaactcttattatcatttctcttttcttgtctcctctacttattggggtgttggagatttggggtacaaatacacaggttttgatgattagaacaagggatccccatctcagcccttgagggatttctcatcctagtaaaaatttcccgtttctcagccatgttgctctgcctcttgcatctgcctcccagaatcattcttcaccaagtccagacagtatgtgtgtgtgtgtttctagagttgttcctaagttccctgctgccaggagaaagatgccctctgaagtctaacccgcctcccttggctgcagcctgaaccagccctttccccaaatgcttatgtgtatcaacagatttctcctctgggtataccaagtgtctaagtgcggtgggcatgttgcctgcaatgtctgtagtttcagaggctaggtattggtgatctctgtatctagagaacattagttagtctctgagatgggttgagatagagtttcaaagtatgtggtttctaaatggtggacattctgagggttcatcgctcactgtgatctggaggttgggtaaatttgagagacatatttatagacagaaaagggctgaatttgcaaaactctgctactcagtgcattctgttggaatgaagctcaaagaccagttctcctgcagtatactcatggttatcccataaaggtgacagagtttgatcttttttccatctaaaatctgataccttaagcctaatttctagctctttgctgtcgccaatgtgacatctctcttacttcaatagggcctgtgtggcattggggtttaaaggagaggcagtttgcagggagagcggcatggcaagaacaacagagctggggaaggaggaccctggtctcatctcagccataggcgacacttggtctactgttctctcttctcaaagttttgttcccatctccagctcttgtctttggaggcccctctgtgtcaccaggcctggatattccattctttccccctgacatctttcttcctcaagctcctcactgtgccttgagaaggctcctgacctatggagtggcttccatcctgtccactgagactaggtggggtgaggtggtgggggcagtgttgaatctctgggcactgaatgggagaagagataaatttggtctctacttgtccaaacaagggcatatttcccaccttctgccctggggcctccacagccagatgccgacaaaagccatcttctccttaccaccagaagaaccagaactttccctaaaggatgagcagggttgaactaggggaggagggcacagaggagggaagagttgggaggggaggccctctcatgtctctgactgtgaacaggtaagctccccgacttcttcttttctagatatttagccctcagaatctcatgatcccaatgttcctacacacacaccccatccttctttcccacagccatgtagctttcctcatactcttttatagaggggtggtgccaccttccaagtccttgtcttctgcagctatttggatgccttcctctacccagatatctgacaccaacttctctgtttttctcctgccaattttgcggcacctctaccttattttcctgaagtagatggagagctccttcatctttctctgcccccaaacgtgtaccttctctgtcatataattcccatccctgaacctctgcatttcttcccccaagtctccagagccttctgtgatgtgatcctctcctcttttcccctttgtataaatgcttgtcttgtgttcctttagagttgccaggtgtctcactttcaactgtgatctcctgaaggccggtagggtccccttctcactttgtggactctcttcttgccattttaggcctctgcttccaaatgcatagagcctcccttactgtttctgtgtgtctctgtcctccagatgtacggggaccctctatgcaccgaacccaatacgttcattccccgtatgatcgtcctggttggaaccctcggttctgcatcatctcggggaaccagctgctcatgctggatgaggatgaggtgagtgtggtgagaaggctgggaaaacgcatgtgggagaatggggagagtcctcattagtgaaggggagagagacacaaagaaggcagacaaagaagaaacatttgcaaatggcaggagggtggccattgagacttgggttggagtgtgacaagaggggtagtcattctctcatcttgggcagggagtctttgagggttatgagctgtgttggggaggagatgtggttctgaagatttcgggggtggggaggctcctgttttcacactgtccatattgtaggataggttagaatggggaaggggaactgaagggtttggagaaggggtgaagacatggaaggccctcccaaccaaagcaatcctcaggacccctctctgctttgcccactgagcaagactcccagtcctttctccatcagggggcagagtgcaagaagagaaattgcaggacgcagagaaaaggcaggggatagaggaggttttaggtagctggaggatactgggaaagaagactgaggtcagtggatcttggcatgatggggtgaagactgggagagtgattgagatcaaggtttagagagacactgagagggcttctgcaagggagtggttggacatcaggaaggaatataagggaggggaactgggagtatgtggagttatctaaaggagtacaagtggagtaggggcagggactagccagagtaaaggagatgaaacggacagaggcctcttatgggaggtggtggccaggtatggagatctgagagccagggaagtgtgggttctgatttgggagctgggtcagcaggagtgtccattggaggaaatagaggataaaaactggaatggtgccccacaagtgtgagtcagggaatgggggtgatttgggggacaagctttaaaaaatggtagggtagcctggaaaaccaaacgtggtgagagatggaccctgaaagttattgggaatggtgtgatgaggaagggttagaatttgagtcagggctaactagagtgtcaagggacctatgggggcaggtgagagtgtggagagatggctgggtagacagcttccaggccacagagtaaagtagaggtgttaaggagaggatatggtgactttgaaaggagaggtggcttggggagtctaagttttggacaccattgggagacatttgagtgactgtggtcaaacccctagatcaaggtttggagtctgtaggagaaatgggggaaactggaacccagagtggggactgttatagggatgaagagggaagacaatggattggggtaatgaaggaatgacagagatagggacagactgaagggaccagtggccagcaagttgaggggcaataggaatggccggtctggagcaggaagggcgtgtgtgtgggaggaggagtagatagaattgggaaaatgagcagcctgaacagacgcagggagttggaattggatgggtggtggaactggggctgggggatagtgaggggtctgttcctgtggctctttgtagaggtggaggagactgcaggggtggaggtgtatggaggtagggatggaggtggacagggggagctgggtgtgaagcttagggaaaggtgatggctgaggggaagaagggaactgagagatgctgggtcgggtgatggaaggagatgaaaggtgggggaaggtgaccaggccctctggcgggaggggaggttgggtcccagtctggccgcaagccgggccgtgggagggagacaagctgtggatcctgattataaatgcagcttctgctacccccgtgacaggctcggagggagagaagggggtaagggaggtgggaggttgggaggaaagcagggagaatggaggaactgaaggtcaagggaaaactggattcaggaagtagctaacttctgaggagttgcagaagagctgagtagggtttgggagaattctccggaaggtgtttcaagacaaatggagggagaaaagagggtgggacggcaaagaatgagagagagagactgggggagagaagggagagatccagtcaccaagtgtggaggggccggggcagaaaaagtgggcaggcttagggggaaaaggaggcccgcccttcctgggaggaggcggaggggggaagagggaggggaggggcggcgtgggccagggaggtctgacacacccccacctcccctagatacaccccctactgatccgggaccggaggagcgagtccagtcgcaacaaactgctgagacgcacagtctccgtgccggtggaggggcggccccacggcgagcatggtacggcggccgagcaggctctcatgacccggacaggcgcggggagagggctgaagatggaccgggctggcggggcgggggcgtcggggagcggcgggagctggccgggggcgggagaaggcggagacaaagtcttgcttcccgaggggagatggcgccctcctctggaaggtggagcgggacaggggctgtgggtgagaggcccctgtgggtcctcgctcggcttcgctccctttctcctctccagcagtgaagtttgactattttcctggtgcttgtaaaaatagtctccttagatctttagcttccagtccgtgtgttcctgcccctgcccctcccagcccctggtctgggatcttggaaagaatgacctagttcctgccctccccccagatctcttccccacccctatgctcctgattcttcttccggaccttcagtccttgaggtctccttttattaccccctgttttctcctctcatcagctgcttctattttctgcaattgtatcaccctttctctttcctccctgatttctcttattttctgtacccctcttgattaccccgtcgctcccctctgctcccggcgaaagtccatcagactcccatctcatctcctttctgtctgtagagctatctgcgcggtctgtctctccaactctctccctctctccatctgtctcttcccctccctccccctttctgcccccccaaccccctctttagtcatttaaaaaaagatttttgtcttcctgagaagttcgcttaaaaggtttccatgggaacagtgaggggagatgaaggcagagaacagagatctgcagccaaggtgcagagagacgccctcagcccccggaaaccccctcgtcactgcccccttccacttcatttcccttcccggacctagcgatccaggttccccattcctccaacccccaggtgacccctttttcccaccagctccccctcccttcaggaattcaagctaccagtttctctcccttagagagccagtgacctgtccccatcctttggctccttccagccttctgataggtccaggccctactagccttgtgggccggtttggggaccttgggtgggtgggtgggtggtcagggatgtgtgtcattgtcatggaaaccccataccatcggggtgtgtgggtagcacatctctgtgaggcaaagtcaggtggtggtggagtgtatacagagaatgtgtgtgatgtctgtcacatctgtgtgtatatgtatatgtgtgtatgtcatgttcatgtctggggaagatgtgtgtgtttgtgtgcatgtgtgtacacctgcgtttccaggccagaatggtcacatgctcacagagcatgtttatcatgtgtcctgtggttggcagatctgcccacttattccccatctttctccttatcctgagtcctcagggtctaggggtctctggcgggggtctcccgtgtgttttgggtggggacaccgtgtgtgtttggagttgaggtggcatgtggaggttgctgtattggggttcagtaggggctgggaggggttccaggggcatatgtatttggggggagggcttagtgaaagttgatgggggtgaacgtttagggtcttcaggcagacatggaatgtgtaaagggcatggaggatgtgcagtggacataggggtcgttgggaccttggggacttggcaatgccaaggtgtttgctgaggctgtggactctccagcccgggagaggtcgccggacctttgaggggcattggaatcctgggctcctcctctgctgggtggagccgcgaaccctcgttctctccgcggttttgtgtgtgtgggggggtcctgctcaggaggggatggtgggtggcctggtttgttttgggggtccccttgcccccctcccccgtctctctcgcgctgtctccgggcgacagggctcgtgacagaggcggccacggcagcagcggtcgcctagcaacggcggcggggcccgggcaacggcggcagcggcgggagcggcggcggagggagccgttcccgcggccgtcaccgcgcggccgtcccggccgtcccgggccccgccgccgcccccaccgcgccgggcggcgcgagccgggccgtaccgccccctctccctccgcaccccgcccttcccccgcgcaggggcggggcccctcccccaccggggacacccctggcccccccggggggcggtgcgaggtaagggcggggccgggcggactaggagcgcgcgtagaggggggggcgccgcgcgcgtggggcgggggcgcgcgtgtgcgtgggcgcggggaggggggtggggaagccgcggtggcggcggcggcggcggcagctgctccctccgcatgttctcgctgcatcttccgagtggggggagttatggtaaccggagggggacagcggaggacgggagggtcggggaccggcctcgtgcggacagggtcttgagcacgcgggggcggccggtgtgtgtgggatcttggagcccctggtggaaggggcagcccgtgtgtccgcgtgtgtgttcgtgcccatgctcgtgtctcctgtgtgtcggtgccatgtgcacacgggggcccagttcctcgtgcacacatgtgcagccagccttgtgcaagtgtgtcctgtcttatcttgcctctgcctgtttcctgcctagggggctgttgggccagccacgggcttgtggggcagtccgcggccttgctggtccatgtcacctctgaccctgagcatgcatatccctggctggggctcacctcctgtcaggcttctgtgtgtgggaatgtgtggccctatgagcaggattttctgtgtccctggtggcaggtgtgtgtctttgcatgtgtgttccagcactggcctgagtatctgtgtcaatcccagcatgggtgtccagggcgtgtctggatgtgggtggtgtggctggggggagtaagtgtgtgaatgtgttccttggaattctactgtgtatgaaacacctttgggctgggcaggtgtaagccctgcttggtcagtaagtggggacagaaaagcttaaaaagggaagaaatggggtaaagaggaaaagtggggaggggataggagagaaggaatgagagaggcttgaagaagagagcagagagcagcaggccagggagaaagaatagctggagaatgggaatgtgggagaaagccaagccagacttagaagagagaacaggggataagagcttaagatggggaactggatagagatggtgggagaagaaggggtctgggagctggggaggcagtggggaggagagagtcaggccttctggtaaagtgatctctgaaagaagaaagggaagaagatgggagaaggcactggattcttgtaggccttgcaggatcaggcttggttttggatcagggaaggccactcaggcatacgggctggctcacagtgaggcctgtcatagcagggactgtcattagaggttcatatccccagcacagagctctgtctcccatttctctgctctgtgtccaaccctgttcttcgcccttctctggcaacctccctcctctggctccccttgagagctgccagctgggtgtggagaggaagaaaggccaaagggaaggttagggatttggagggcagggggagattctgtgggtgatggcaagattagagatgttggaggggcaggagtccaagcccttgctgtgtgtgtgtgagtgccattgtgtgtgtacacagggtgtgtacatgtgtgggtgtgtgcacaatgcctgtgttacgggtttgtgtaggtggctgttatgtgtgtgcatgcgtgtatacatcgtgcaggcatgggacatggagacccaggatcacagtttgtgcttttcaggtttgctgtgtgtgtgtgtacacgggtgtgtgttgttttctctgtacatgtcactgcatgcagcattaataacaggatgttctgtgtttctgtcactctgccccccctttcctctgtgtttctgctattcttttcctgcggcaacaaaagtgtttaataagcatatgtgtatgtggcctctgtgtacctgtgacttatgagtgagttcatggatcttagttcttggtaatatgtgtaaggttatattacttccaagaaccaagcaagccaattagcaaatttgttcttctgttaatgctttagttccaaagcggaattttaatgcatttaaagttagactttatgcctttattagatgagcttgcacatgaaaataatggctgagctcggttccctgaaatgagagtgaggcagccatacctgagaaatgcagaaaaaatgttactagggaagagatatcctgaaccattggatgcattgcttagtgtgtaccagaaggataattaacacatttgctcctggtttttctttactctggtggcaatctcggatgcctgtgttagagtgagagaagggctgggggaggaaagggggttgtcctgagacagagtggatgtggttgtacttttcacgtgaatgaaaggatgtttgtgcttctgagatatggggatacctttctgtggtcaggatcatggtgtactcaagcatgtatttcaggggttaaactggaattcccctgcatggggatatgtgtgtcttagggttataggtccatttctgtagtgtgctgtccacatgattgcccaagagacttgggccacaaagtccacaccagcagctctcatgtgggtcactgggttcaagtatgtactcccttgttgcagagctcacatatgtcaaagcatgtatcctgtggggtgtgtgggcctcagggtctcagaatgtggatccgtgctatgcccgtgctcacagttgtctgtatgtctcaaaagcacatagatccccagttatttttctgtattgtggttctcatatacacgtacctccacagctcagtatatgtttctgtactatacacctgttcctgagggagtgatagggttctcgtgtcatggggtccacatttttgtatgcaaacctcctaacacctgggttttacaggtaaagggaagctgaggactgattctagggcagtttgcaggcaatttgcaattctggaagcagacagtgaaaatataattgtggtcctcccttgttctgttctggaacctagagggttaacaggcagctcttccggtccacccccctccttccagcctgtagcttcttgttgccgtggagatggtggccccgccccgatgcagcacctgcccccccattggctgcagtggtgactgtggggctgaggggggagcccaggcctgggcagccattctggagctggagccggagcttggcatccccccacttacattctcttccagcccctcggcccctctaaattcccttgcagccgagcctcagcttcctttttcagcgcttgccatccctctaggctcttggcagactgagctgcatccgcattcacctcccctcctcctcctttccctatccttacttgggagtcccgagaacccccactgtccatccttcctgctccctgcccattcccctgcattctttgcttttcccctccccccaccaaccttctgagcccctgccactgcagtgcacgtggaaccggctccttctcccttccccccacctgccccttccttggattttctgtccccagcttctccccctgctactcttcacaggtctcttccaagacctccccctccagtccagggagggggtcatgggaggcagccctggccctccagacagacaggggttccaggaggtggggggcaggtggaagatgtgcccaccagggggaagaggaaagcctgcctatgggcaatgacctttaacccatctttccccccagctagccccttctggggtgggtgggcaccagggacctagcctccctggatctttggtgtccttcattactggggttttactgaccctctcagtcatgctcccctgctgactgccagccccagtcatgggcctaaggcctcccaccccatccccctcagggggctcctgctcaggttccttgccccctccttcccgctgccagcctctccgccgtcgctgctcttcctgctgctttccggggggtaggtgaggccggagctgaggggcagagggaggtgggggcatgcactggggtcaggggtgggaacctgggttaacagcttcccttctggccccctccccaacttcccttctggccatttcctcccctccagaataccacttgggtcgctcgaggaggaagagtgtcccaggggggaagcagtacagcatggagggtgcccctgctgcgcccttccggccctcggtgagtggtgcctaccagatgtggctcagttgggccccctcccctccagccccaactggggccctaggagtctgagaaagagggcaggagggggagagagggagtgagagtgagaaaaagagtgtgtgtctgtgtgtgtctccccacctctttggtttcccccttcttggctctgcccccctgcttctgagaccagccctcccaccttctccaagctgtgtgtgtgtgtatatgtgtgtgtgtgtgtgcttgcactgtacccgtgggagcaaggaagacaaactggtattagggttcctatccccctttcctcgcctctggagacttcccttttccccatcccactttcatccaggggctctctaccagctgagggatgagtaggtagaactgaccctgccccaacccaccccatccccatttcccccccagcaaggcttcctgagccgacggctaaaaagctccatcaaacgaacgaagtcacaacccaaacttgaccggaccagcagctttcgccagatcctgcctcgcttccgaagtgctgaccatgaccggtacaggggctggagcatgtgggatgagattgatgtaatgtagggtctcctgtgtgagatgcagagggagggggttatctgtgtgcaaaggttgaaggattcaactcaagttggttgggggatgtcatggcacaggggacagaacagaaaagaactagaatagggatctgtgagcagcaggagaggggtagggtggcagagagaagacagacagacaggctggaaagggaatgaaggtgaagccaaggagggactcctcagggactcctcaggccaagaaggatgggctctagcccaggatcaaaggagctgtacaggaggagagtgaccctggaggaatgtttaaggaatgcagggaaggggttggtaggtgagtgagcaataggctgtaggtggaagggtgtcagggaaggtcaggaaatacaggggcagcaggttggagtggggctgggggtggctgaatgaatggatgatggctagggctcaaggacctcatcagtgagggaagagacagtatagagcatggcagagaaggggagggtgggacaggtgtgcagggtgacagaatgggaagcaacccatggactgaggcatgaagaagcagccagcggagaagtccagaaggcactgtccctgagaccaggctgaaggagacctccactgtttgcctttgttgcctgccatttggggttcctctctgggtttccccctcacccagtcactccccagggagaaccatgccctccctttcccccatgtctggccacccccaggattgggcaggtagggaggttgggataaagtgagtcacacctttccctgcccccctcccatgttgccagagctggatttggggccggcagggggtgagggcatggtattcctggccgcgggggcgggggggggggtccgggggccgggggagcgtcgcgctgacggcagccagagcctgcgatgacggggctgctataaataacttcttggaggctcccacacccaagctcccctcccgctttcccactgctctctactcttcatcccctgcccatctccataccgcttttgtattgctatcctacccctcattattccatgcccctagccccctttatcttctgccctcctgcagtgatttttttgcattccatcccctcttagccctcacctcggttctcccggccatctctccagttggccttcctcctcttctcctgtcctctgtcttgctgcacatacctttgtctccccctttcttcttcttgccctacctcctcttcttccctagtccctgtattctgtcttttatcctctttgagctcttttctgcccacagctttctcctatttcttatgcttttccctcactctttcccctgcttctgctaaaacttgtcctcttatgctgtgttcattcattctttgaatcattaaatgtttatcaggcactagccgtgtgccaggcccaggctagacatatctcttctctgtgccttcacttctttacttccactttttcctttatactgaggctctggtttctggggttacctggaggtactacctagaagtgccccaggcccactttgttctctccttttttttttttcttttctgccatggtccatttctgggttgagatatttctagatgtccccagtcctcgcaatcccttaggtgtgagatggtgggagtttcttttttttccttttttttttttaaatagaaatagggtctcactgtgttgcccagactggtcttgaactcctgggctcaagtgaccctcccacctcggcctttgaaatgttgggattacaggtgtgagccaccaggcccaggtggagcaggggagttccttaaaggattctgatttttctcacatccctcacgtccttcctgataggcagggtttctttctgtgtctgtttgggaagggtgttcagggggccttctctccaagtctccatcctggaacagactgatgatgcagggtacctatgtgtctaagaagagtaggggggccgggcgcggtggctcatgcctgtaatcccagcactttgggaggctgaatcacttgaggtcaggagtttgagaccagcctgaccaacagggtgaaaccccgtctcagctaaaaatacaaaaaaaaaaaagaaaaaaaaattagctgggtgtgctgaggcaggagagacgcttgagcccaggaggcagaagttgcagcaagccgagatcacaccactgtactccagcctgggcgacagagcaagactgtctcaaaaaaaaaaaaaaaaaaaaaaaaaggaagagtgggaagccctgatcccttcctctcctgaacctcctgcctgccagggcccggctgatgcaaagctttaaggagtcacactctcatgagtccttgctgagtcctagcagtgcagctgaggcattggagctcaacttggatgaagattccattatcaagccagtgcacagctccatcctgggccaggagttctgttttgaggtactgggtctggtgggctggggagggccaaaggacaggggtgatggaaggtggggggcagagaggtctagagaaagtggcacaggtggggacatcaaggaaacagaaacttctgggactggaggaaagggtaggccagggaggaagagaaggtagcagagtctcctcccctctgtagccctttccctcaactccacactcctttctaggtaacaacttcatcaggaacaaaatgctttgcctgtcggtctgcggccgaaagagacaaatggattgagaatctgcagcgggcagtaaagcccaacaaggtattggggaataaaggggacacaacctgtgtagggcaaaggttgcaccaacacgggaagctgggggcctagggaggaaagtgagttaaaggaggagaggcttggggaaggagaggattgaggtacagtgtatctggacaagcagggggagacccccattattctgagtcccccatttcttttcgctttctgtactgctaccctgccttacgatctctttccctgccatagaagtcatagacttacagagttgatggggctctggaaattctttagtctagcttccctgcaggcaggaatgcttcactaataccccgcaggacacatcaaatacacttagccaagtttctgtaccttggtttcctctctaagacagagggaactggtggcaatgggttggattaaatgatctctaaggtccctttggcacataaattctatgagtctgttcttcccaaaacttcatgcttccagttctgtcagctattctctgtatcccagtttctagcaagcttacagtcctagtcacactcctctggggggaactcttgtgtcttgatgtccttaaagaactcaacccaagatgctgacatgatctgacctatgcagagtacaaacaccatgttccctttcaacacactgcaatatcacctgagccttaccattagcttgtgctcaattgtatccccccaggcccttactgattcttttttttttttttttgagacagagtctcactctgtcacccaggctggagtgcagtggcgtgatcttggctcactgcaacctccgcctcctgggtttaagcaattcctgtgcctcagcctccccagtagctgggattacaggcatgcaccaccacacccgactaatttttgtatttttagtagagacgaggtttcaccatgttggccaggctagtctcaaactcctgacctcaggttgtctgcctgcctcagcctcccaaagtgctaggattacaggcatgagccaccacatctggccaagctttacccattctatatgcaattcttttttcacaatttctgatagtctctgcaggactttccagttcccttcaaattctacattaatatttttggcttgttattccagcttttgaaatctttccaatactgtttgtgttgtctagtgtatgtctacgcttctacagtagcttcctggggctgctataacaaactgctacaaactgggtcacgtaaaacaacagaaatttattctctcacagttcaggaggctggaagtccaaaagcaaggtatcagcagggccacgctctctttgatgctgtagcagggaatccttccttgcctcttcctagcttccggaggttgccagcagtccttggcattcctgggcttataactgcatccgtctaatttctgcctccatcttcatgtagctggcttccttctgtgtgtctctgtatcctgtatctctgtgtctccaaatctccctctccatataaagacaccagtttttataaggtgggttaagggtccactctaattcagtatggcctcttttttttgagatggaatatcgctcttgtttcccaggcttggagtgcaatggcatgagctcagctcactgcaacctccgccttccaggttcaagtgattctcctgcctcagcctcctgagtagctgggattacaggcacgtgccactatgcccagctaatttgtttttgtatttttattagagacggggtttcactatgttggccaggctggctcgaactcctgacctcaggcaatccacccacctcggcctcccaaagtgctgggattacaggaatgagataccatggctggcctcttcttagtttgattacatttgcagggatcctgtttccaaataagatcacattcacaggttcagggtagacatgagttttggtgggatactattcaacccagtacaccgtctcaccttatgattgctgtctgtatcccactttcttactgtctctcctcttttggtgtctctctgtcccttccccctttaacatcatgcccaccccaccatgccaggacaacagccgccgggtagacaatgtgctaaagctgtggatcatagaggcccgggagctgccccccaagaagcggtactactgtgagctctgcctggatgacatgctgtatgcacgcaccacctccaagccccgctctgcctctggggacaccgtcttctggggcgagcacttcgagtttaacaacctgccggctgtccgtgccctgcggctgcatctgtaccgtgactcagacaaaaagcgcaagaaggacaaggcaggctatgtcggcctggtgactgtgccagtggccaccctggctgggcgccacttcacagagcagtggtaccctgtaaccctgccaacaggcagtgggggatctgggggcatgggttcgggagggggagggggctcggggggtggctcagggggcaagggcaaaggaggttgcccggctgtgcggctgaaagcacgttaccagacaatgagcatcttgcccatggagctatataaagagtttgcagagtatgtcaccaaccattatcggatgctgtgtgcagtcttggagcccgccctgaatgtcaaaggcaaggaggaggttgccagtgcactagttcacatcctgcagagtacaggcaaggccaaggtgagtgttgtgccctcagggaaaggtgacttgggaatgggcacttgcttgggggttagtgaggacagggcaaattcacgagattgggttgtgcagaggctgacacttggattttcctgggcctcaggacttcctttcagacatggccatgtctgaggtagaccggttcatggaacgggagcacctcatattccgcgagaacacgcttgccactaaagccatagaagagtatatgagactgattggtcagaaatacctcaaggatgccattggtatggcccacactcaggccctcttcttcccaaacctgccagatgtccaccccagaccccaagtccacccttccacagcttgatacttcctaacccagagtcctaggactccagcctccaacacctgattctgaaatttccccaaccctggccacccccttccctgcccttggaaagtgtgaccacaccctcttgtgcccccaccccccaggagaattcatccgtgctctgtatgaatctgaggaaaactgcgaggtagaccctatcaagtgcacagcatccagtttggcagagcaccaggccaacctgcgaatgtgctgtgagttggccctgtgcaaggtggtcaactcccactggtgagactgggaacgctgggctggggggccagggtcgggggaattatgtgttcatctgttcatctatctgtccatcctcaaagaggactgagcaccatttatgggcaaagcattgttctaggcgctatagagcaaacaggtgaaagaggcctggtccctgccctcagagggcctccaccagaatggggacaaattagaagaaaaaaaaaaaaagccacagagccataatggtgtgtaagtgctgagtaagggtccccccaacctctgtgtgacataaggtcagagagaaggcagagctttgagataagtggggaagaggtgcccccttgggtaggctttgaagactggtttaggttctgatatatggacatagttggcaagaaagacatttcagaagaaggctgtgagaaaggcacatgtgtgatggtgaaaaggcccaggagttttcaggggacattaaagtaggttagtagcaattacatcaggtttagtggagcatgtgcctcataatggggagtggcgggagagatgtctgggcaggaagattagctttagaaactggaaggcctcaaggagtctgaggtcattggtaggccttgggatgccattaaaggtgtcagaaatattgtgatttagaagattaatccataggctgggcacggtggctcacacctgtaataccagcactttgggaggctgaggcgggcagaccacctgaggtcaggagtttgagaccaggctgaccaacatggagaaaccctgtctctactaaaaatacaaaattagccagatgtggtggcacatgcctgtaatcccagctattcgggaggctaaggcaggagaatcacttgaatctgggaggtggaggttgtagtgagccgagatcacaccattgcactctagcctgggcaacaagagtgaaactccgtctcaaaaaaaaaaaattaatccataagtagagtgtatgtagtagagtagagggatgtatgttgggggatgactggaatagagccagctgggggctcggaggcatgaaagtcagatcctgaatcagaacagtgacagaagttaggaaggagctactggaaggaccctctcgggaaaggatcagtaggaattgtcagcttattggaaaggagggagcatgtctgtggggagtcacggatgactcaagaggccatgaggctggtggttgggagaccggtggcctcattgacaaccaggaaagtcaggaggaggagccagttggaggtgtgggggcgatggtgagctctgctttacaccagccgagtttaaggtgtcagtgggacattgaagtggaactgggaggtgcggggagtgagctctgagccattccagggactggggatcatgcctggggcacctccatccccatttccctggaatccagaagagttggggggtccgagctccctgtacctcaagtgaccctccatctctctcccatctctgtctctccctggtgtctgtttttcttctcctcctctccttgtctctctcccacacccctccatctctctcccacgtgtctctcccctcaccttctctccccctccatttctctctccctaatctgtctgttccctctgccatggcccccttcttcaagcagcctcccatcttgctcctgcggtccctccttccctgtctctctcacccctgtttccacaccctcacctcctaccacccccctcagcatgttccctggaagctgagggtctctggggctcagtcccggtctctctctttctctctctctctctctgtctccccgacccttccccccagcgtgttcccgagggagctgaaggaggtgtttgcttcatggcggctgcgctgcgcagagcgaggccgggaggacatcgcagacaggcttatcagcgcctcactcttcctgcgcttcctctgcccagcgattatgtcgcccagtctctttgggcttatgcaggagtacccagatgagcagacctcacgaaccctcaccctcattgccaaggtcatccagaacctggccaacttttccaagtgagggaagcttcaggagtgggcagggcagggagtggcagggcagggagtggcagggctgggggtcggcaagaagggtctcctgagtccccagagatcctgagatggggaggctatgataccttgtgtgtgtgtgtatgtgtgtgtatgtgtgtgtgtgtgtgtgtgtgtgtgtatgtgacctttatcttctgcattcttggctaggtttacctcaaaggaggactttctgggcttcatgaatgagtttctggagctggaatggggttccatgcagcagtttttgtatgagatctccaatctggacacgctaaccaacagcagtagctttgagggttacatcgacttgggccgagagctctccacactgcatgccctactctgggaggtgctgccccagctcagcaaggtcagcagatcccctctttgccctatccccagatggctccagaggttcctggagcctgagaaactaccctttgaagattttttttctccccttgtttctcgaggtgtcaccactactatcccaactcaggccccctccacctgcaccctcagaggccctcttagagctgggcactgagcccccaggtaacagcctcacccttccaggaagccctcctgaagctgggtccactgccccggctcctcaacgacatcagcacagctctgaggaaccccaacatccaaaggcagccaagccgccagagtgagcggccccggcctcagcctgtggtactgcgggggccatcggctgagatgcagggctacatgatgcgggacctcaacaggtgagcaccctgggacagccaggcctgtgccctaggagcccttctcctattctagatactcctcactgggccccacatgcatctctctagggcttgaaagaagggaggaaaaagcaccaagttctcaggggagacgataaggagacaggtacagtcagtggtaggctgagagccctttacagcctgagggagtgagagatttggagctctaggaatagggctgaggctccaccaactcacggcttagttgtaagcctagagcatccctgctgcaagctctgatttgctgtccctctgcctgcccatgctagtccccaggctgaggttcagccagcatgtcatgtcagccatgtgtcaaaatgttcaaacatctcagtaatagctagtgaataagcacttcccccagcccccgaccacaaccccacagacctccccatgatccagcacttagagcagtgacagcagaagcctagcagggcctgcagcctgctccagagtcccagcctccattctgataggtggtgcccgtgcttcatttgctgctcattattttgatgatggccctgctttttcctctgcccgtgtcttcctccatgacaccatacccatcccaccattcccgcctctcctttcatttgtccacatctctctccttctctgtctgtgctcgcccctctttccatctctctccagctccatcgaccttcagtccttcatggctcgaggcctcaacaggtgaggggctctcccctcccccgccctcctctcctctcctgtctgttccctctcccactccactggccttcgccctactcctctcctctcctcctccatggacctcatctcctccatatgtgcccagccctgcccccatcccttctcttgctgcccccatctcccctcctctaggcctcacccccttcccggaggggccctgtcctttccctttactcacctgtcccctcccatcctccctgcctgccctcttcagggctgccaccgctagctctcagcccttccctctgggtcccacttttcaccccaaggcctgtgccagaccacagcaaggttcaattgctaggagccctgaccttaccttctgcttgtgtgcccccttcccttctgacagctctatggacatggctcgcctcccctccccaaccaaggaaaagccacccccaccaccgcctggtggtggtaaagacctgttctatgtaagccgtccacccctggcccgttcctcaccagcatactgcacgagcagctcggacatcacagagccagagcagaagatgctgagtgtcaacaagagtgtgtccatgctggacttacagggtgatgggcctggtggccgcctcaacagcagcagtgtttcgaacctggcggccgtaggggacctgctgcactcaagccaggcctcgctgacagcagccttggggctacggcctgcgcctgccggacgcctctcccaggggagtggctcatccatcacggcggctggcatgcgcctcagccagatgggtgtcaccacagacggtgtccctgcccagcaactgcgaatccccctctccttccagaaccctctcttccacatggctgctgatgggccaggtcccccaggcggccatggagggggcggtggccatggcccaccttcctcccatcaccaccaccaccaccatcaccaccaccgaggtggagagccccctggggacacctttgccccattccatggctatagcaagagtgaggacctctcttccggggtccccaagccccctgctgcctccatccttcatagccacagctacagtgatgagtttggaccctctggcactgacttcacccgtcggcagctttcactccaggacaacctgcagcacatgctgtcccctccccagatcaccattggtccccagaggccagccccctcagggcctggaggtgggagcggtgggggcagcggtgggggtggcgggggccagccgcctccattgcagaggggcaagtctcagcagttgacagtcagcgcagcccagaaaccccggccatccagcgggaatctattgcagtccccagagccaagttatggccccgcccgtccacggcaacagagcctcagcaaggagggcagcattgggggcagcgggggcagcggtggcggagggggtggggggctgaagccctccatcaccaagcaggtaggtgaaggcaggaggaaggcgggctgggtcacaacagggagggaagaaggagatggggggtggggttgaaacagagtctgtggcctgaagttacaatcttcttgcctccttttggccattaaacaaatgtgtatagagggcctgctatgtgccatgtgctatgccaggcactaaggatacggcactgaaccctcttagcactctcattccagaggggattaatccataagtagaatgggggtgactggaatagggccagctgggggcttggaggcatgaagatcagatcctgaatcagaacaacaggagaaattctctggcattcaactcacatctctggcattcagaggtgataaaggctacagcagggcaataggactgggactgtcgtctcctttggctgtgctgttgccctctaaatgtaccctgctttttcccaccttttctttctctgttcgccctcactgtgccttgtcccagcattctcagacaccatccacattgaaccccacaatgccagcctctgagcggacagtggcctgggtctccaacatgcctcacctgtcggctgacatcgagagtgcccacatcgagcgggaagagtacaagctcaaggagtactcaaaatcgatggatgagagccggctggatagggtacgatgggctctaccagctccaagccccagtgtttccttttacccacaggggagatctctagtcacttccaagggaaacctccagggtcagttatggtggtaagaaaaggcaaagacctgatcacctcttgagaagccttccgtccatctggggagaccagatacacacagttgttaaaagtcactttcaactctattttgtaggttatatatatcatagactatctggggatcatctattttaggcttacctccatgttcttccccaggaggaacataagccctggctcctgtgactgcttaggaaaggaaatgttactttactggcagtaggagctaataaattggatggggatggagggggttgcagctatattacaagtgatgtctggcctacccagtcactgtcccatgggcataagtgacagtcagtgggcagggaatgcatgtggtaaagtagtatgtatcagtcatgtgtgaaaagaccatccagaccctcacttggtggaggctgagggcaaagggcaccaagagctctggggctaacacagataacttagcagaaagttacttgaggaagctgttgttcctagggcctgaggaagagggcggctgcaggattaggtcatatataaagaacatatgatcctaacacggggaagtggtctttgagcataggaaatgttgggactgactcagatgggcttgaccagcaaatttaatgagaattaaaccctaatattagccccaaggcagccaccgtaggaagttaattcacatctctcctctgcatgtagaagggttggtgatatatgtatgtatcctcttcagagaatgaggaaatagtcttttgaatcattttttttttctgtgcttcagatgaggaaaccttgttgagaaaggctgtagactagcactatccaatataactttctgcagtgatgaaatgttctgtaatctgtagtgttcacatgtgtctagttgtgattcaggaactgaatttttagatctatttaattttaattttgtaatttttttgagacagggtcttgctctgtcacccaggctggagtgcagtggtgcaaacatggctcgaggcaacctccgcctcctgggctcaagacatcctcccacctcagccccctgagtagctaggactacagggtcgtgctaccatgcctggctagttttttttcttttttttttttttttttttttttgtagagacggggttttgccatgttgcccaggctggtctagaacttgtgagctcaagtgatctacctgcctcagccttccaaagtgctgggattacaggtgttgagccactgtgcctggcctaaattttaaatagctacatgtgggctggtggctaccatattagacagcacagctgtagactctagagccaatagggcagataaaatgactcttctgagctcttccagctctggaattcctagattctcagcctagaattcacttgtagacctcctatccttggcaccttgacagagccaaggagagggtcacatggaggacagcacctgcctttcccccgtcaattgccttttcttcctatgtctccagcatgtgttctggggcctggcttagggctgaagagtcaccctatttttaatttctgagcacagttactcaaggtgtgtttgtgagtgtaggtttctgtgtgggtcttcatgaggggccatacatagacctcagggtgtgggagtctgtgaccttgctccattttgagggaacctcagcaccatggcagggtcttctcaaaagcaggtgtgtggatatgatccacaggcagggaaggggttggggaaggcagctggatgtccctcaacatgcagtggctgtgcttggcagacagggatggaggctgggtggtgggcttggggtggggcgcccctcatagtgcggggtcgtgtgcccggcgggcaggtgaaggagtacgaggaggagattcactcactgaaagagcggctgcacatgtccaaccggaagctggaagagtatgagcggaggctgctgtcccaggaagaacaaaccagcaaaatcctgatgcagtatcaggcccgactggagcagagtgagaagaggctaaggcagcagcaggcagagaaggattcccagatcaagagcatcattggcaggtgaggggcggcctggggagggggttgtgagggagagcctgaggctggagagagcaagtgggcgagctactcctctgactcccatccccaaactcaggagcccaccaggagagcccaccactctcctccccaggaagccacccactcactcatcaccagatggagagaaaccccaacctgcttagtgcattaaatatctctttaccaaaccctgacctctcttctgatagagtagcttcggaagcccttggaaaatgtacctgttcctgtccaaccatcactgcatttgcatttaccctaggccagagctccccactagttattctcaacttaacctgtgatgttcactccaaacctaagcagggctccctagccagagtaggccctgcccttcctgggtggaccctccctctctagccttggaaaggtgttctgttagaaagggtcttttagcctgtgtatgttttcagctgctccagcaagtcctgggctccaaagagggtatcctcagcaaagaggtcaattatcttcagagtggtggggtcggggtgggggggaccctgggcgcactccaaccagagccacctccattttgatccattctaaatgtattttatgtaagatttaattagaagaaaagggcttcttgaaatattttttgaaaaccactgctctaattgatatcctttatgataaatcacctcgaggatcttcacagtgaggtgacatgggggatgcagaagccaggtcctcagccatggaaggtctggggaaggggcactgctgtcctgattgggacgatggaggcctggaggtgtctggatggtagaagtctttgaggcacagaaagctgccttagcagggaggtgtaagggttcctgggaggaaggtggagagcatgatcctgaggaacagggagtcttgcatcacggcaatggagggactctgattctaagggataaggatgcctgaggtttttccagagagctatggggttccatgggcaggctctgagcctgtgcccgccactaaccccactgaagcccgtcccttcaggctgatgctggtggaggaggagctgcgccgggaccaccccgccatggctgagccgctgccagaacccaagaagaggctgctcgacgctcaggtggaaattacaatgtcatttatcttctccgtgtcccatccccatccatcccactgtctttcgtgcactcactacaccagccacctagccccatcaccatctgtctctcatagtctgctgtttgtccactggctgctcctggcagccccctagtgaccccatcttcatcccatcgtctgtgcctttgtcactcctggcagcgtcagcccaactcctgtgccttcccatccagtcttcccactcctctctgcatctcaggaccttctctaccagaaccttggtctttctgcccctagaccccacctagttccaagaacccctgccccttctttgctcactcctattcaagccacgttgttcagcttcctctgcgctcttgggccagagggctagaagctgctgttttctggaatagagcacagggcagtatgatctgtagtttctccaggccctggccggtaccctgaaaacttggggacccatcacctctgttctcttggctccctaattttcctgtctccttggcagctcctgcatagcttcctcttcctgactcttcagatcttgaaggccttccatcctgtaacctccctttgccctcagtatttaagtccagcctccctctggcctccctcccactctggccctcagaccttcccagctgcctgctgcccagcctctcttctcacaagccagcttctaggacctcccttctgcacccttaccccttgctttcccaaaattctgctcattttcctacccatactcctctttgctctgactgctaggctccccccgcctgccatccccccaccaaggctcctgaccccatgaccccactctctcccactgcagctcctcatcaggtaattctcctggttccgctttggccacgggcggaggacacagggggaggtgactccggaccactgcaggttggtcgtgaagcccactccctccaacacctccggagcctctcccctctcactgctgccctccacacccagagaacctccacagactccagccctccgacacctgcacagatccatctcccaagacaccacccaaagagagcatttgctgctgcttcccagaactgtccaacaataccttagcaacaccaagagttgggccctagatgggcccagcacattcacaggtcacacccacttccctgcaaaacccaccccctcccagcctcctcctgactctaagccctcctcttcctctacctctccagtgtatgtctgtcaccccccatttcaccagagcgtccttaggggctgggggtgggtttgttaatggggtggaggcaatgatgggttggaggatcttggctataggggctgtgctgactgcagcaggtaggttgggtttccctcttccttccctaatcttggttctctaccctcctttccactcctcacctgattctctctcttcctcctccttatatctgtgaggcagaaggcatctgaagctcatattagcccccattgggtgggaattaggagtgggtagttaactcagggagacttgagataccctggaaaaaatgctattgagatgtcctgacattaggcagggtggatggaacaagaaggagcaagaaaggaacctcaggcagatgttaggacatggacttgatcatgtggcctgggagtttagaaatggggagagacatcctcctagatcagatcgtgggctcagtaggcatgttgattcccagggagaggtgccaggaacagcatggtaaagaatgtactcttcacagctcacatccccaggttgctgatgccactcactccccctctcctgccatcgagtggccttgccggacacatcaccctacctaaaaagccagtaaatgagaacctgtcagctatagccatcatttctgagatgcgattttctttgggattgagctgcagtgggcagtggctccttacactgtaattttaattctctgcctgcccagcctctctgtcaaagtagctggtgatctataaagatgctaaaaggcaccaggggactttgccatttaaaggactcctgcagtgaattcttttgtaaaatgaataatggcaccctaatttatccactttctaaatttgggtccatgggggtgtccagggcatgcttatgtgctgtcaccagcagacaaacagagggaatggaatctgggggttccttccctgctctcccgccatactcaggataccctaccataagtgatttcctctcactgacttgcagaaaatgtgtgagatacccagcaagctaagaaggcagttttgctgggtatctcatacccaaggctggggtttgggtgatctgagaggttagctccttgatcctaggatggaagggagagcttatatagaagcttttacttggaaggttttgtatcctaaggtcagacatagctatattaccaagcctaaatgccatgtggcccaggaaataatttggacatttgttctaaaccacttgtggtaggtattggtctctctgcaactcagccattaattagaaattagttttgagcctgaattttaaaaagccaagtgttgcccccagcccacacacacacacacggacatgtacagtacaaaccccagataattacaacagccaaagagagaaggaagtgaatttcccaaccagaagcgtagggaaattcagatggctttcttttctcccagcagaggaacagaaggcggagctaagggcaggaaccaggagttggtcaaggagctataggaggtgatgagagtagaaccaggggtaggagctggtctggtacccctcaccctctaattgggagcccagggagaaggactgaaaagaagatgggagtggaaaagaataaagccagtttctgcttcccagggatgcagagattggggcatgctgtgtctgcagaagctcctagtcatttccgccataattgtgagagagaggggcagccctcccacaagatttttcccttcccatatcacttccctgaatccccttcctttccccccagtacagttaaacctctctctaatttggaatgttatatttgagaagatggccactgtgaataagtgacaaacggaatgacagtgtctatttaatgaaatgcatgtcttcaaaatatatacagaactcgatgaacaaggctttttccactcctcagggagcatgcattaatgaatagataggattcaaaagtctgttttctggtatgggttaaatatcccctcctacagacatatttccaccactaatttgcttagtacaccttttcttcacagataaaggaaaatgcaagctcagtttttcttcagattatgaagaaattccaaatccacaggggtttggattaatgaggttttgctgtactgcctccccttattcctcaacatgaagttcccacctcggattggggatgggtgggagggggtttcaagaggaggagggtgggatgggcaaggaatatacacaggtgaagccagagaagggttaggttgggggtgcggtgggaacttgctgttttgatctggtttcctggtgtgacactctgggttaaaggcttgaaggcccctgttaggagtctaggggtgagattctcttctctctgatcccagaggacgttaacttctactgcaggtgagaaacaaaataggaggatggtggggactgtcctgggaggagggggtggtccatggcttgtggtgtgggctggctataggggaggccactgctaggggactggcatccaggcccccttgaagcgtctcaataagtccgcgctctcctttttggtgtcttgcaggagaggcagcttccccccttgggtccaacaaacccgcgtgtgacgctggccccaccgtggaatggcctggcccccccagccccaccacccccaccccggctgcagattacggagaacggcgagttccgaaacaccgcagaccactagcccacccagcatcagagaccttctcttcctttcctgtgcaccccaccctgtaacagcaccaaccaccaggattggacatcaccgaggaacagcgggattgcctccccgaatgcctccctgggaggcacactgattgcccacccccaccactgcaccatttccaggagggagagtggggaccctcagccgcccccttttccttcccattggggtgctgccctctctttgacccccagggacccttgccccaggacaccgcctaccccgtacagaccccttcactccggggtgctatccccatcctctgcctcatcgttcccctgagcactgggggacagaccctcacccccaccctgggggtgtggcacctccaaactttcaacttcagggtgatttttttagcagtaaccagagctgacaatctaactcccctccaccgccccattttggcctcccctgccccccttgttatggggaggggaccccgggtgagggggccctattaccccttgatttctcaggagcgtctgggggggctcagcacgcacaaactccttctccttctaccactcttaaatttactccctccccacccagaacccagatggggtggagggggccaccggggcagggagggggcggcaaggggggaatgggagttgtctccccttctccccacacctgatctgctctcggctggtcccagagcggggtgagggggcttatgcccccccctcccccagtgtgttgggtggggtggaattgaggttagggtgaggggtcagggtttaggagggtgtgtatgttgggaggacaggctagttgatctgtcctactctgacacacagtcccctctgccccttccttctctcttcttggtctctactcccagggggaggggggaacttactctaggaaaagccatgtctctctcccccagggtggggggacctgtgttggaggaggggtgttggggggcccccttccatgactctgtcccctgggggaggtaggacagggctgggcttccctctcatcctccccctcccaatctccttccacctccctccctcccgccagctccacgatttttcggtgtttctctgtacatagttttctggcgggataggggaggtaggatggatggggtttggggtgggtaggccatgggaggggagaagcccctccttggcaccccctcttccctgactgctgtcccctacccagccttgcccccttcatccttttgcgtttggtattgagactctcctagactctactcctctttcttttgtatggacagttccccttcagtcccatccccctacacatacacccagccggggccaaatttatacttatataaaagttgtaaatatgtgaaattttatccctgtgccctttccccacctcaggccctacccctggaccctccccaaccttccttctctcttctttggctgttgtaattatctggggtttgtactgtacatatccggggtgtgtgtgtgtgggctgggggcaacccttctgtacagagcttcctggccccctccccccccgcccctctgcttccctccccacccaccacctcaagggtagggagttgctcttcctacctgttttattttgttttctcgttctccctccccaccccactcccagccttatctatcccccctcactgtccccttttctccactcccagccccatttcctttttttctggagtgtgtggtgaaacagaaaaaaacatgtttaataaacggagattgttctttta

SEQ ID NO: 4 - RNA, 84480 nt, Homo sapiens
aaugugcaggaugacaagauggagcaaacagugcuuguaccaccaggaccugacagcuucaacuucuucaccagagaaucucuugcggcuauugaaagacgcauugcagaagaaaaggcaaagaaucccaaaccagacaaaaaagaugacgacgaaaauggcccaaagccaaauagugacuuggaagcuggaaagaaccuuccauuuauuuauggagacauuccuccagagauggugucagagccccuggaggaccuggaccccuacuauaucaauaagaaagugaguguuuuuuaucaggcauauuuugcugcuaauugccuacugcauuccuuggacuguuguagcaccaacacaugccaaauuagcacaaaaucuuaaguauccuucuguuuaagaaaugaaacacauuugugggugguuuaugcauauacaugagaaaugaauugauuauaucauaacauaugcaacugucccaaaugcaccaugacaaauaaaaagaggccaggugcgguggcucaagccuguaaucccagcacuuugaggggccgaggcaggcagaucacgagguuaagagauugagaccauccuggccaacauggugaaaccccuucucugcuaaaauacaaaaaauuugcugggcgugguggcacacgcauguagucccagucacucaggaggcugaggcaggggaaucccuuguugaacccuggaggccgagguugcagugagccgagaugacgccacuacacuccagccuggagacagagcaagacugugucaaaaaaaaaaaaaaaaaaaagaaagaagagagggugggagggaaggaaggaaggaaggaaggaaggaaagaaagaggcagcuaauuuaacaaauugacagauucucuccacagauucgauuuacuauacaauuuuuuuguacuuucuguacuuggaaauacuuggaaaucucaaaaucaugaguuauaaagacuauacaaaauauuaguacuaauuuuucaugcaaacaaauuugaugccacaaggguuugcaauuucaaugucauguuauaaacaacaaaucaauuaauuuccugaagaaauuuuguuaccuguaaaauaacauuuuuacauaaacuagaauuuuacaaguuauuuaauauuuugguauuaauguacuaauauuggcaagaauuaacaaaaaugucauaaccugaagaaccuauaaacaauauuugaaugcgugcuuuuuucauauccaugcuugaaaugaaucuuauguuaagcauccaaccguucauuaugacugucauuucaccaaaccaaaacaaaaagcauaaaauuuuuuuuaagauuauugcauugauuuuaaauuaaauguaugacguuaggugauucguaacauuuucuucuuuaucacuugacacaaugcauuugugaaucuuaguggaaagguagggcacaaagauuguaauuaaguaaauuuuuuuguuggaccuggaccuuaaaauacccccuaaacuuuuagggacucuguuucuggcccaguucugugugaaguuaguccuugccaaaugcaugcaaaaguuuggcauuuguaauaugugaauuugaggcaguuuuauaaaucacuuccgauugacagcuacaguuucggaggaaagagcgucacaaaagguugacuagccuuagguucagauuuuuuuuuaacuuuucaggauauagucaguuuaaguauaacauauuuucccuuuuuuuuuuuucuuuuugagacgcagucucgcucuguggcccagacuggagugcaguggugccaucucggcucacugcaagccccaccucucggguucacgccauucuccugccucagucuccccaguagcugggacuacaggcgccugccaccacgcccggcuaauuuucuguaauuuuaguagagacgggguuucaccauguuagccaggauggacucgaucuccugaccucgugauccaccggccucggccucccaaagugcuaggauuacaggcgugagccacugcgcccggccaguauuuuccuuuuuuuuuuuuuuuaaacauuauacaacuuuaauguuacaccaucuacaaaucuaaauuacauuuaaaauuaucaguugacagugguacuaggauuuacuuuaggaaucacuacauauuuccccuuuuuaaaaacugaucuauucauuuuacaguagaggaagggauggaucauuuuccauguauuucauuuuccucuaacuuugcuuuugaacaccauauugucaaaucuuaguugauaagagauuauuaaucucauaacugccauuuaaguuaugagaaaaguugcacuuuauuauuuaaucaacucuuuggaaauuaauguaucugaaaagccaaagcccaaacuaaacaaacuacaaggacuuuauuuguauaagaaaaguaaaaaugcagauaauccaauugccuaaacauuuuaauucguuuaaaaugacuucgguauugaagugaagacugauguguuccaggcagaaauucauucacaguauagaguaugcuacuguauuuauagccauuggauacuuuuaguuuauucagaggcugcucuugggauauguuagugggcuccauccucaacaggccuuuugcuacccccagacaccggguccucaccucuuugguagcaaucaccaucuaaaaauuauuaaagccacccagcaucuaucccuuaaucaaacagggaagaaauuuaguaucucugcuccuaugcuggguccuuauuuguaaaauaauaaaugaauguuuugagaaagaccaaacuaaugcauguugacaaagguagacauucuucaucuggaaaccagaacaaccaaucaaucuuuuuuuucuuuaauuaaagagcuuucagacugauaaaagugauugucucgaggggaugucccuaaacaaaaugguccauaauugguuuauaaugaauuauauauagcaaaggauauaaagacagauguaaaacaaaauugugcaaacauuuucaaaauacucaaaagaaacaucuuaaaacugagggugaaaggccaacucugaugaagugacagccagauucuugugucgaggaaacccuuauaaacuuuguuaggcucacgucuaaacuugcucuuaacaucuucuguucuuaucuucaaaugcacaugguaugaggaaagaaaagcauuuuggcauuuuggagcaaaucacagugugcaaguagaacaaccugauaagggaaauauuguuaucaggaaagaguuuuccccaagguaagguauacucauggcuuuuacauugaacugacagcaagcaaaucuucaaauguaagucauucaacagcaaugcacacgaagcuuuuugcagggcugaaauccuuaaaaacuaacauggugugcuuagaacacaugauugaguuauguguuugaaauuuccuucuucugcauuuuuaugucuuaagacuuuuauaaguugccuguacacuuuuuucugccuuuaauuuucuuuucuaauuggauuauuucaguauugaaaaauauccuuaaauggaauuaauuugcucugacuaaaguuggaaugcuuagcaaaaucugaaccuuuuaaaaauaaugaauauuucuuucaauauucgaugacuaauuuuacuuuagugacuggguuaucugagauuggcugggugaucuucauuaaaacaaugcgguacacauacacaguacucuugacacagcuaaauggucaaacaguggaaaugucaccagggaaaauguuuauuaggacgagauuuuccacuaaugcugauacuggggguguggauuagauuugccugagugaaauggaauaugcaguuagacuagugauuucccuaaaguuggacucuaguacaauaguuaaugugucauuugcaucaguauacaaagacucugguuucuuucucaacuauauggaauagacaaaacaagccaauuguaaaaauauuugcagaauccauuccuuauguuauauuuuauguuaaagugcaguaguguacaugcaaggaauuuaugugaauagaaaaaacacaaccaccacacugaagcucucuguaaucuuuuacaaaggcagugucagugagcuuauuaaaaugucacugcugagaguauauuuuccaauggcauaugcccacauauuuuuauccucuuugucccaguuuaagaugugcaaauuauguaauguucaaauauucuacuaaaauuguuaaagcaguuuaauccauguucaguaauauuguaguaguaacuaaagaaauaguagcaucuaugcaucaugaacauuccugaugcauagaagcauuagaagguuuuuagauccucagauguuuuaagccuucagaguuccagguuaaaaacucaggggaaaaaaaugcuaucauaauauggugacaguauuuuucauaucauguuagcucugacucaguggucuuuagaacaugauuccagauugguuucccuuuguuuguuuauuuacuuuagcuguguagcaaggcacauuuuagcuugugaacacaccuuuuuuucccucacgggacuuuuuuucacaguuuccuuucauagcuugggcugauuuuguaccauuuggcccuacauucaaauucuuuacccacucuuuauuacagaaaaugucuuccuucucauguucuuguuaaaauuacagacgaaucauuauuaccauggaagaaaauaucauuuuaacaaugugacaguuuacuggaaauagaaugagacauuuuagaucuguaguaaaaauggauguuuguuaauuauggagugcagaaaugcauucauuuuuaaaaaguccuauggaucauuuaaaaguaacuuauucucucuugcuaucaacuguccugaaaagaugcacacucccuuuuucuugggcuccaugagaagucauauaugaauuugugauuucaaauucauguuuggucuaucacugccaaaggaguuuuuaguuguuaaauuggguggagagaguuuguuuuguuuuuaauuggaauuauggaguuuuucuugcaaaaguaauuaacgggaaaucagaaaagaggaugauuauuaaaagcuuauaauuucacgaauugucauaugggcaguccccaguguguagcuguucuuugcuuaucaucagcuccuguaaaacuaaaagucacccagacucucccuuacauccaggacccuguaguugacuucccaaucuuucucuucccuaugcacuauuucuuccuugugcuucuuuuuccuuugucaccucccugucucugucucagaaacagucccaagauggugauguugaucaauaaaaugaugcuuggcauuuuuagaguaucugccauaucuauaggagauccuucaacugaaaguuuccaaaacccaacagaaacaacuuuuggggaaaaauaaaggaaaugugucuagugaaucugguuuuaauaucaaaauacccaguaccucaaacaaugucaugaggguacuccuuuuccauggucagcucugcugucacccaugcuggcuucauuugcaggcuggcucuuccacaagauggcagaaauagccaccaguggugcuaaacuaacauccuacagccuuguaacuacuaucuucugcuaaaacaagaaagaagaaagaaaaaaggcccagguuuccuucaaaagcucuagcaguuguccuagaauugagucuaauuaggucacauggccuccucugaaccacucacuuuggcuagugguaugugauggucuccuugguaugggauggucucugucauauacuaaccuguguugccaaggggugggucagcuccaccaagccacaugggaagacaguggggcagagauuuacuccaaaaggaagagaagaggaacuguuagaaaagguguccuaagcaggcaaaaaaaaaaaaaaaagcuauguacucuacaugcuauauauaauaucaguauaauuacuguucuuuuuuaauccacagauucuuucaagauagcucuugucuuuauuuaaaaauaauaaaacugaguuuaaauaacuugccuaagacuaguuuuaaaacuagaccagugaguuuccauggcccauugccauguuaguuuggauuugcagucauagcacuaaucacagcaguggaaaaaaaaaaaagagaagucagugauggaaucuaaauaagccuauagcuguccuuccuguuuccuacucaugccauuuugcaagaugugauucuggucucccaggccggcaguauuucccgaacccuuacuggucauuucaacacuuggccauuuccugccuuuguaaaaccuuauuuauuuauuauuauuauucauuuuuaucaacaucaccaucuugggacuguuucugagacagagacagggaggugacaaaggaaaaacuaaaaucuuagacacucagugaucuagauuagcuucuaaaauaauuagaaauuuuuuuucccacuaaauuccaguagggugauaagcaccuauuuucaaagaggaucaauucaggaaauuuaaauugugugccucuauaaggaaauggcauuuaaauugggaucugaagguuaaaaaggaggagggagaggagaaucuuccaaggaaagagaacagcauagaauaagacauauaaucaagcugaccuguaauagguaagaagagaauaaggugagguuggggagguagaccuggggcuagauaaaggggaucuuucaguacaucuuaaagaguuugaagguuaucuucaaagcaaaaugaauucccaacaaguauuuagguacagcaguaacaugguccacuuuacauuguuaaaaaucacucaacuucucuauggagaaauuuaggaguuuuauacuugaucuagcauuuugacaauggagauggagaauaauggauagagucagaauugguuuuggagguguuuaggugucagacagaaggaagcugauggccucauuuucuuagauaggaaguuugagaagaaagauacugaaccugaaaauuccaauacuaaaauuggccaugcuuuggagaaacagaaauguucuuauauguguauauuuaagaguuagaauacagagacgcauuuuaaauauuuuaauccuuauauuuuuauugacacuuuagaauucacuaagggcauugacauguuuuauuucacuuuauccucaaaauaauccuaagauugguauuaguauaaucuucuccauugagauggagaaauugaggggaauaguuugcucauaguucucacacagcaagcuuguaaucaagcugggcucaaaaguguucuuuccagucaaagaaaaauuaacugaccauauaauaguguagcagacccaugguauguacauucugaugauauagggcugaaaaauguuucagcuccagauuuuauucuuuuuccuuguuguuauaauuucuucucucugcuggagaagagguugagggcucugcagccuuggcugacaaaagccuaccuaggcacuuucuagggaggcaccuucugcagaguuaucuccuccacuggccccaacccuccacccagcuaaagcauaggaacaagcaauuuuacagacucuucucuagguacaaauucuucucuuuugugugagcauauggcaacaauguuuaaaaacugacugugaggcauggaguccacagacauguuuuguuaaacuaacaaaauuauuuauaauuuugaauuauuuucuggcauuuauaaaucagaaaaucuuucacacacucauaaaauuauacaucuaaggauuccucuugaaauaugaguucaggcaucacugacuuauaugccuaaaacuggcagguaccuauugucacuuagccucugugggcauuuuaguuuguaaucuguggcuuaaggaccacaucugucauuaagugaaggcuauauauuaaagcuugguggcccacggguaggcaagugacacagauuguuguuuagucugguuaucacugguuggaaggaaaaaauugaaugagacuaggagaugaaaaaauauuaaauauggcauacucucuucagagucagguagaaagccugcaagaaaacuuuucaucccccagugagccagaaaaggaagaaaagcuuggcuugaacucacaggcuaugacaaaugagaagggaaguaggugagaccauuuaaaguccuuggggaaaaaauauuauauaccauggaauugacccagcauaagaaauguccccagagauauguauuauacuaauggaaucuccugaccaucuaugcugcucuucacacccaaaacuuugaagcaucucuccucuugcaacauggcucuaauucucccccuucaugcuggaaccucuuuccaagccagcagcuuagagcuaugaaaaacuuaauagcacuucuggguaggagcuagagccagauaauuuuccuggucugacuuccaggcuauuucaaggacagaacucugccauuuucagaguaacacuuucuuacacauagugauaaaguuucucagugccauucauucagaauuguacuucauuaacaguuugauagaccugugggucuagaaauauauguguaucugugagaauauauguucacauuuccaaacaauugacuuccaaaugcauuucuggagcacagcucauguacaaguuggaaauugccuguuucaaacuuugaagcuaaaggauaaauuuaaccaaccaguaguauauucuacauuuuguguauuguucaucaucauagcucaccuuccuguguuauuucuuguuuuugccaguagauuuacuuuaagaguaggaaagugcaauaaauuuggagucaguccuguuauuuggcaauguuucaauaauguuuagaugaaacacaaaguuacagcuuauguuuaaacuauguacuuugaagaauauggccccuagauugaaauaaauguuaagguaauggcuauauuuaaaugagaaaaagaaacuggaaaaccauggcuuguuaaauucaauguccauccugggaaaaaauuguaaacaaaucacuuucuauaagcccagaaacaagaaaagauuacuagauaauaacaaauauagcuucauaaauagcaauuucuaccaaaucauuauaacauaauuauuuucuuaguaacuauucaguuagaucaaggggcaagauuucaauccacauguacaacauaaucauugauaauuuggccaaugguuugugauuuuuuacaaccauuagguaacaaacauauuaacagcccugcuaugacagaaucaucuggauuacuuauuuaaaguauaaaaacuagguaucaaaaucugaccagcuaaauuggaaucacauuaccucuaugagcuaaguacauuuauucuguuuucaagugagauaacugagucacagaaaguuaagaaaccuguuccggaucacacugcuggaaggcagcaaaguuagcuuuugaaucagaaaucuaauuucagaguuugcacccuuaacauaagauaaaacaaaucauacuuauauuuucauaauguugcuucccagauuauuaaacuguuaauuaccaggguuauuaccaauuuuucuauauaacuuccuucuugcuuuuucuuuaaaaccagaaaugauuuuuacauggcaaggauugcugaagaagguaugagcuugcugaacaauggaugguuuaaguuuaggucugugcugcccaauauagcagagauuaauuagccuuguguagcuauugaguauuugaaauauguaaguguaacuccauauuucaaagaucuaagacuuaguauaaaaauauacauaucucaaaaauuuuuuauaucaauuucauucccaaaugauaauaauucagauauguuggguuaaagaaaauacuguuaaaauuaauuucaccugcuuuguuuuucuuuuaauguggcucucaggaaauuuaaaaucauaacuguagcucagauuuguagcuuacauuauauuucuguuggaaagugcuggucaagguaaccuucaucaauucuucuauauucuauuaaaacaaauaguugagcaucuccuaguuuauaaaugucuuggugucauaaccuauguaucuuuguuuucucuuuagaauguagcacagggcauugcaaauauuguacuaaacaguuaauacauguauucugaauugccaucaauugaaauuaacaauuggaccuaaacuaggucccugcucauacauaauuaccaacuuauuguauauaugcccaauaaacuugguaccuguauaugaagacauaagugacaagcuagaacaacccuauuguaugaauguuacauuccugcaaauaagucuguaaagugauuuuucauauauaaaaucuaguuguuaccucaguuacaaugccaugcuucaacauuuguuuugaagcagaaaauuauccacguguuaaaaugauguuauuaauuucaaacaguucuauuucuuuguagaacugcaauuaaagcauuuguuuuggcacuaaaaugaacugaaggacaaauauuaagaauagucauagaugugccugaauuguacuaaaccacaaagucuugcugcuuguaaguggagccagucaugucaauguuccuaugagccuugggugguaaaaagggguuuguuuugggcuagauacuacuguauaaaccuuuucuccuccaccaccaacuuugaacuguuucuuuuuuauucaaaugacuuaaugcaauaaaaguuauccugauaaguuguauuaaugaaaucuuuguugaacuaauuagauuuaaaggaugcuaagauacuucacuauaauaagcuaaccaauacauucuuuuaaaaaguuuuuaaaaagucacccaauuuaauaguucauaaaucuugauuagcuuaaagcuacacaauauuuguuuauacaguuuaagguacagcaauaucuuagcuagucuuugaacucuucccucuuggagcccuuucuuauacguauagcggggaaggcaaauauuuauauauuugaaaacucuagagcuacuuaaguauuuguuguaagcaaacaguauuuccuucagacucuucccucccuucaauaucaucaaugccacuuuugggagaaagcuguaucugagaguccuuggaaacaaguauccuuuuauuaauucuuaacacuuauaaacugaaugaucggcuucuuggcuauguaagcaauuacaaggagguaagauacagacaguugaggaaauaaacaaacauaagaucaauuacauauaauaagacugacauucuaaauggaacuuacucugacaugaaagugcuaucauauuuaaaauuauacauauuggguugcuauacaagucuggguacuguugcuuuauuggaaggcuguuuaaaauccaucaauaccuuaaagcuacaucuaugaaguuuguacauaagcauguauguuucaaucugagaaaaauggaguucucacagaagaaauccuaugaaaaaaugguccuuuaauguuggccuuauuguuagcuuccuggguagcaaggaugucuugcacaacaguaugucuuaugaaaaauuaaagcaaaacaaauaccguuguucaguaaaaaccuuaccaauuccauuuauaaauucaacuugcaaguauuuuccauugcacauauaaaucuuguuaccaaauaaucuucuacacauucuuuaaauuuuuaaaaugaauaaagggaauacacuguaaaaucaguaaauguuuucaucuaaggcuugaacaauugauaauuaugcccauuuguuuuuaacuuuugugucaaaguauuaauuuucucuaugucaaaggacuuuuagauuuagaaucacauaccaacauugagagugcuuugguuucauuaaacucaucuuacuuaguuucagcccuuuauaccuccuuuuaucuuauuuuuuaaauugacacguaauaauuguacauauuuaugaagcauauagugguuuuaauacauaugauguauagugaucagaucagaauaauuagcauauccgucaucucaaacauuuaucauuuuuuguguugggaacauucaauaucuuccuuccagcuauuugaaacuauauaauaaauuauuuuuaacuguagucauccuacagugguguggagagcuagaauguguuccuccuaucuaguuguaauuuuguguccuuuaacagauuucucucuguccccaccuuuccccgauuuuugucuagaauccucugcucuuuuuacuucuaggcagacuuccuuuuuggaaccuuuuguguuugguuucugaaucuugccucuuuuacuuuuuaguacucagggcagaaauauuuccccucccuucuuuuagaucucuagcuuugccuuuuacuuuaccacuccuugucugucuuuucuguuuuggucauuuauuaccucuggucaugguuugggcugaacaguggccaaggagccagcaucacagguguucucuucuaaguaugguccugucuccuuaggaugagccugguuauuuuccuuauccacggagguacaaacaguaccaucuugauuauccucacacuccagcccaugauuuaggccaucuauggauugucauuucuuucucauuaucucuuuguaucacuacuauuuguuucaaaauuagcuuuuaauauuaucugaaaucaagagauucuuauuuuaaaauauauauauucuguguuauauuuuuacugguucuccuaccugugccccuaauauuucuuuuucuuuuuuucagauggaguuuugcucucaucacccaggcuggagugcaguggcgcgaucuuggcucacugcaaccuccgccuccuggguucaagcgauucuccuguucuccugccucagccucccaagcaacugggauuacagggacccaccaccaggcccagcuaauuuuuuuguguguuuuuaguagagaugggguuucaccauguuggccaggcuggucucaaacuucugaccucaggugaugugcccacuuuggccucccaaagugcugggauuacagacgugagccacugcgacuggccaucugagccccuaauauuucuuucagauuuuacucagcauaucuggggggaaaggaaguauaugcaguacauuugaaagguggaccauauuuauuccugagcuagcucacuuugggccuuucugugucguuacaugcucauauucccccacagcaaaggcauuugcauugcacaagucuguucagauuuacgaugaucucacaaugucauucagggacagaaucccucaaugaaucagagaaaaagagggcuaaguauuguuggcauaggggauuguucuucuaguaagcacaggugaaauucucccuuccuucaaaugcgcuuugugguaaagcucuaucuguuuucuggacucauacuccuucaaagaugauagagggaaugcaggcagaggugagacuuggagcagugcuucucaaacucuguugaggaugugaggucucuauucuucuauaaaaugaaguaaaaauuaguuucuagaaaacugaaaugaaaaacaggcccacaacaacaucccccuacuuuuuuauuauuagaauagacagacacaacauuaauuggccaaauugccuuacaaauuucuaaacauggacucuccauaucuauacuuaaccaguacugguugggggaccauacuuucacagccaguuuaggacacuucuacccauaccagauagaaagugcuuaauuuucaaaaaccaacuccauuagcagguaggggugugggaggguggguuugcuuuacuugaauuuagaaaauccugcaaguauaggggaaaucuguuaaugagcuaagacuauacaaagauucuuaguagaaaauaaacauaacauuuaugcuugcuguaucauaacaugaucugugcagauaugcauccuaaggcuuagaaaagaaagcuuucgaagaaugggugaauuuaaaaucaagaagcuuaaaauuuccuuccccaaauaugcucuucacagagauaaaggcuuucucccuggcucugucuaaauauaaguaagcaccuuggaaaacauugagucagagcccuuuuuauacccuuacauguugcuucuuuaauguuuugucugcccacugccaauugaucucaaauaagucuaauuuuuggaaggaauuucauucacauucauggauccuggauucuucaggagcuuggagcuucuccucugugauaagaaagcacugcauaagauaggaagucaauugggauuagaauucaauaugucagcuaacucagaaaucccaguacagaauuuagcacuccuggucaacggguacucuccagggaucuuggccuccagaaaucaauuauuggauuacauccaucuaacccaagaguggguuugaugguggcuguuuuuauuuucuauuacgaagagagugauaauguuuauuuuaugaggauagaugguaaaaacaaucuuuauuucaaaaauaguaucaguucuguugaaugauuuugcguuccacaggauuaauuuucaagauauuugaauugggaaagcugaaaugacuauaaaaagcauguagugccuuaaguuuuuuggaaugaaaugaaaugugcacccauuuaagacuuucauuuaacucagacacuuaaaauaucgagaaaauaaaugacuucucuuggcuaauugucuuauguacaauaaaauugaggguaaguauuagguaaaagguaagugguaucauuggauuuccucucuaauuaagaagagauccagugacaguuuguuuucauggggcacuuuagaaauugugauugugcugguuucucauuuaacuuuacaauaauuuauuaugacaaguaacagaaaguagauaacagaguuuaagugguuuauacuuucauacuucuauguuguguuccugucuuacagacuuuuauaguauugaauaaagggaaggccaucuuccgguucagugccaccucugcccuguacauuuuaacucccuucaauccucuuaggaaaauagcuauuaagauuuugguacauucauauccuuuuucaagugauuaauauuaacuauuuguacaugaucuguaagcacuuuauagcuaaauaucaaauuaaguugggaaauguccauauuauauaguuuucaucacucucauuuugcaucuuugucauauuagccucauucuuaaaguucauuaaucacauagacauuacugaaacauguacucuuuaacauuuuauauauuauauauaaacauguauuuauguacuuuuguuaucuuucuaaaaacacuuauauguauugaauccuacaaaucuaaaguaagauaaccauguuuaccucuaccaucuuuauacaaaguuugugaugguguagaauuuucagugagcaaugauaugauaacagaaaaaucuacuuccagacucaaguuuauccauaguuaugauauaaaacacuucaguguaucuuagaauaaaccuuuaaguauauuuucugucagagaaugucaggagucuuuggccaguacuuaguuaauucuugaaauuuccugaugauuuuugugaaggaaguacuggaauauuggcugaauuucaaauucaagucaugaguuaugaugcugccaugcaaaacuguuugcuuaguaaagacuccggaaguuaaugagagaaguuggcauauauuuccaaauggucuuaagggauuugguuucaugauucccauugguguuaaaaaggacuccacgacuaaauucauuuguuaaucaauuuaggaaaacaauucacuucugauuguaucuuguuugauagcuuugacaauaauagauauuaaaauaccauuauaauuaucauaagcucauacuuuuuuuuaaaggauucuaaaauuugaacggccauucuaauuuuaauaugacagcaagaaauuucuuuagugguauaaauaugcuauuacuaaaauuaaaagauuugaaacauaaaaaucauaugauaggguuuuuauacuuagggaaguuuccuugucccaguuuguauuccuagcgccaucauguggucauuugaugaaaacuuucuuuuucaauuauggaaaauuuuuguuuuggcaguaaacuauaguggaaagaauauuggaucuuaauguaggaaacuuauauucuaguccuggacccuuuaucugauuccucuagagcuuaguaaggccuuauuucccugauuuuuaaaauauagugauaaacuaauuuuuagggucccuuucaguuuuauaauucuguuaugucuguucauuuguuuuagcuaccacuuagaguauauuuacuuacguaccgugacuguuccaagcauuuccaauacauuaacucauuuaaucugcauguagaaaugguuacauuacaaaaugaguacauuauuagcuccauuguagagaaguaggaagagauacaaggcaauggcacagagagguugagucucuuggccaacaucacuuugcuauguugaauuuuaauuacauucccaucauguuaagugucaaccuucaagaauauucacuuuuaauguuaucgaauccugcugcacuuguauaaacucagucaaaauagagcaacccaacaauuagcaucgugcuguacuuugacuacaaauuguuuucaugcguugaacuguguuggauaagauguguuuaagaaauuacaauauugcagauaaguggccuuccucaacaauuuacuaguuuauucaccugaaugagcucaagucaauacuuucugcugaaaaacugugcaacuccagguagcacaaaaauagucuucccacugaaguucucugggaggugaauauauugauuuaauaauaguuguaaaaacaacaccuuauacugauauaaugcuuucauauacauuaccucauuuaaucuauacaaauacucagugaaggugauauuauuacccacauuuuacacaugaagaaauugaaauguaaggagauuagaagacuugcccacaaugcauuuaucccugaauuuuggcuaagcugcaguuugggcuuuucaauguuagcuuuuuguaauauaacacuuggauuuugauuuucuuuuguguguuccuuaacaauaaccuacauuauucagcaugcuaauuaugugcacuauuuugacaaacuguguguuuaugacaaugaguaacccuccugauuggacaaagaauguagaguaaguucaacuuauauuuuuaauaacauauauacauuugggauuuugaaacugugucuuaauguagucuuaaaauaaaacugaagagcauuuuauuaaagucauuccuagacaaaauuacgcagcaagaggacaaugcucauuggcccucaggccugcuggcguuauacugauuaucacucucuuuugccuguaccugguguucaccugaagaccaccacucuuggacauuuaccccuuuuucuuuaaaaucuacaguagccaaaccaaauguggucaaagcaauugcagaaaagagccaauaugguagacauugguuccaguuaaauuccagauaaauacauugaaucaagaaucaaaaaggguuaguuacaaaugccaugugaagacaacauugaaccucgcaaaguuuucauuuccaucaggcacauucacuucaugucaggccaauauaguuccaagcguggucaccaacaaauugaaaaauaauccaaaguuucaggguuguagaacuugaaaauucaguagacugaagacuaaacuaacagaaguggaacuuuuuguagagcuuucagaaaccagaagcauuacuaacuauauugaugaucucucuguucuggggauaccuucgaagcacagaggccagauuugugauaacugaaguugggcuacucuaaccauagcugcucaccugcccacacuuccuauuuguaaugccuguuacuauacagcugcugacccauagcaacuacagaaguauuagguugguguaaacauaauugugguuuuugccauuaccuucaauugaagcuaauguuugcaccaaccuauuuccaagaguguccaccaacauuugcaccaaccuauuuccaagagugucuccuuuccuagacacuuccaggcugaaaccaauaagaaacaugacaucuugaagaaaauaauaaauuuuauauacaaaaaaauucuaaaguauugaagcuaauaugggaggccccacagguuuucagucgcccuaguuuucuugugauuuuaugccacucucacaccccaauuucugaguagaagauuuaaacuuuggaaacaccuaaguuucugaauuaucagaagaauuuuauucuaaauuaaauuuuuacuucuuauaacccuagaaguauuuacuuugauuuuaaagaaguccuuguuccaagcaaguuaaauuaucuuguagaaaaaaaaaaacacgugcuaauuugucaguuuccucucauucuuagaacacuauuaaacuugagauuuuuuucccuaaaagaaaaucauuucaugcuucugcaauauuauugauuggcuauuccaucauguaaacauacuaaauauuucucaggagacuauauuuacauaaauaccaagacauuucagacaauggcuaaauagauuucauauaccuuguauuucucacacuacucuuaagacacuuuacgaaacaacucuuuguguuaggaagcugaauuuaaauuuagggcuacguuucauuuguaugaaauuaaaauccaucugcuuaguuuucuuuuuuaguauuuaucuauuccacugauggagugauaagaaauugguaugcuaugaaaaaacacuguuacuuuaucaaauuuuuuggaugcuuguuuucagauacaccuucacaggaauauauacuuuugaaucacuuauaaaaauuauugcaaggggauucuguuuagaagauuuuacuuuccuucgggauccauggaacuggcucgauuucacugucauuacauuugcguaagugccuuuuuugaaacuuuaagagagaacauaguuugguuuuccaucagugcuuaugcuuuuaagaauagguuugcuuuaccuguagaauauuuuggugugauuuauacauucaaacucuggauuucaauuuagcacaacaaaggucuaaguggaauuucacuauagcaugaaggcuuugcaguaguugaaaacuacaauuuucacacguagcaucagucagaaaauuucacauaugccacucuuccacacacacaugcacaaacacacacacauaugaacacacacaaucuaaugucaaaacacaagcauauuuguaauacaucugugaaaauaacuuuaaaaauuacagccacaaaacaguucuauuggcuacacaaauuugcaaugaccuugcugauauuacacacagcuucuuuuauugguuugguaaaauaauugaaaguaaguaucuacuagcaucaaaacgaucugacaaaucaaacuaagagaagaaagaagauacuugaaauauuauguuuuuaauauauuaaauuacugauuucuaagaccuguagaggaauacauucucucugccucuuucuguuucucuccugaccccuuuucuuucuucuuuucuucuuuccuuuuauggcucucuucaucucuuuagucugaacauaaacuuccuuauccuuaucuccuauucauauccacucaguaauaugcacaguuuaugcaccccaaugcuuuuuuuucuaguggcaaacuuccucaggaagagacccagaaaaauaauagaaaaccauuccagacuaagugaaaguagaguguagaaggaggcagcccaacaacacuuacccucauccuuccuucaggagcugauuuuuuggccucuaacaguugugauguaguggauaggagcaggagagguggcacugauacacucaggacuccgaaugucuggucuuaauuuccuaucugaucaggaugagccaauucuuugcuaggcucucuggucacagcucaaaagaaggccuacaggacuucuauuucuuaagaacaaaauggcaguaacaauaggcgcagcauuggacccucaucaaguauuguucuuaauuugcuuaacuuuuauuuaaaaguuacacuaggaaaaucuuaucucauauauaaaagcaguaaggcaaacugccuuuucaugccuaaauuucuguugggugauuucauauauuuuuuucuaacuaaaacccuaaaccauagccaagauuuacuuucuuuuuacaaguuacacaugauguugguugcauugcuuuccagagugacaacaagggugucuacuuuaugaaguuuacauuuagcuaauggccuuaaauuaugugaacaaagauuaaugauggaaucuaauuccugauuuaccacuuauaauauuuaucauuuaaaaucaccaagaaggucuuuauaaaagacccaugcaaguaauauaaauccugcuaaaaucuugaauaauucugauuuaauucuacagguuuguaacagaauuuguaaaccuaggcaauuuuucagcucuucgcacuuucagagucuugagagcuuugaaaacuauuucgguaauuccagguaagaagugauuagaguaaaggauaggcucuuuguaccuacagcuuuuucuuuguguccuguuuuuguguuugugugugaacucccuauuacagguacgucacagaguuuguggaccugggcaaugucucggcauugagaacauucagaguucuccgagcauugaagacgauuucagucauuccaggugagagcaagguuagauaaugagacggacccaucaugugauucagcauccuucucugcuugacauucaguuuuacagaaaaucaggaaucauaagacuagguguuucaaagaaaaugauucuuauuguuuagacauaagcuuuaucagccuuggaguuuaacaaugucuuaugugagauacuguaauuugaggucaaggugaccugcacuuacaaauaucauggguuuuuuuuuuuuucaccauguuaguuuuaucgagaauuugcucccuuuuaaauguaccaaucuguaauuucuuauucauuagagucauuaaugacuauguguauacaaugcaaaucuucuaaguuuuuugcuaacaaaagagaagggaauaagacaauaaagaauagugugagucugcauggaggauuuauuaucuuaaggcacaauuauacugcagaccauuuucgguuguacagcaaaaucuuuccuacuuauaaauaggaauuuuaaaauauuuauucagguauuuuguuauaaaacugaccucugacccuaaugaaaauaugagacaaguuucaguagcaaaaaggaaaaagacaaggcccuuuccuuaauauaggcuccaugaagaacaugaaccuuccauuacucuaucucgacauaaugggauaugaaucuucauuucauuguuuaaaucauuacauuucuggaguuuaucuucauaaguucuuccccuucaaugaaguguugcuucuccacuagcguugcaaacauucuuggauuuaugaaugaaaucuauguuuucaagaaaauugugugaagcuuuuauuauuucacacguguuaagucuucauaguaauagacuucuuucuuucaggccugaaaaccauugugggagcccugauccagucugugaagaagcucucagauguaaugauccugacuguguucugucugagcguauuugcucuaauugggcugcagcuguucaugggcaaccugaggaauaaauguauacaauggccucccaccaaugcuuccuuggaggaacauaguauagaaaagaauauaacugugaauuauaaugguacacuuauaaaugaaacugucuuugaguuugacuggaagucauauauucaagauucaaguaagaauuauuguuauguacauuuccuuaaaaaguagaauuggauuguuuguaacacaaaggauaaauacuugaggggcuggauaucccauuuuacaugaugugauuagcacacauugcaggccuguaucaaaacaucucauguaccccauauauagaaacaccuaccauguacccacaaaaauuaaaauuuaaaauuuaaaacuaaugaaauaaauaaaacacccucuaaaaaagaauuacuaucauguauauuuggucuuuucauugcuaaugugccuuccaucuaggaaugaaaaauauuuuuaaaugauuacauaacaagacgugaucuuuuagaaaauuaccuaaucaaacuauuuaacaauauuuaaaauuauauuuuauuugguauuucuacccccuggauuuuaaauaauagauuauuuauauuucuggaacuaaaagaagaauuuuguuaaucaccuuaucaauggcuuccacauacauuuaacaacuuuguucauaacuacucuaguuuugacuccuaaaugccacuuucuauuuuaucaucauuuggaaggcugaagaauucagcuagaaagaauuuuccuaggauccuugguugcuauacauucuuccuguggugauugauauaaugaaaggagauaaaauaugugaaugcccuuugcgaauucuacaauacuaugcaaauguaacucauuauacauuaauuacacaaugucuuuaauguaucagaaacuguauaguacacuggggaaaauaauggagguaaugcauggcuucagaguguuauaguuuaauagauuauuuuauuaccuuaaggaaauaaagugauaccuaaaaguaaaucuuauucuuauauuuaaaaaguaguauuacauuaaaaagaagaaaauuacaguuaauaaagcuucaggagacaguaauagaaaauguuaguugggugcaguggcucacaccuauaauccuagcacuuugggaggcugaggcuggaggaucacuugaggccaggaguuugagaccagugugggcaacauagugagaccccuucucuacaaaaaaaaaauauauacacacauauauauauauauauauauauauacuuuuuuuaaugaguugggugugguggcaucuucccaucucagccuccuuaguagcuggugauacgaaugccaguagguccacuucaaucaccagcucccugaaaucuguuguuuguuuguuuuaucuaaguucaaaauacugacuaugaggguuauuuaggguuuauucucucuagggaaaauuuauuggacugcauuuuuccaauacucgaaguaaaauaauaucugaggucauuuucagcucuaaacaucuaugguucuuauuuuaaaccaaaugcaaauauaaauaaaaugguucauuucugaaaauaauagaaaauuaaauuuauuaaaauuaaagguaacuauuauaacugaaaaauuauauuuuccucagguuaaggcugaucauuaagguuagaucauugaauuuaaugggcaaaacuucauuuauaaauaugagauaucaaaaauucauccagaaacuauuauaguccuuucucuuuguuuaauuuuaauugaaaguuaggaaauacuaugucaacuuuccugucuagguucaaggaagucagaauauuagaaauaaaaaugauauuuuuccuuaugugcuucuguguccuguacagaacuauguauggaauaaauuccucagaaaacuuagcaucuagaaaauauaucuucuuacaaaauccaacauugauuguuuaauuccauguuuuucucuuuuugucuuuuauuuacuuauucauucaauaaacuuuacagaaaggcuacccggucucaaacaaacacuaauauagaaauaauuaaugauugggacuuucuaggaggaauauuuguaaauaaauaauuacaauauaguagugucauccuaagaauaauucaaguauauacagguuacugguagcacagugaggggaguucuuaauuaugucaauauuuaguagaaagaaaguugaaaauaccaaggaaaaaguuauagaagaacuggacauugcaagaagccaaggaguuugcaagaaacaggaaucuuugagauaauguaguguucaccuauagucauuauuuuagcuuuaguauuuaagacuuuuuaaaauugcuuucauuucaguuguugauaugauuuaugcauauuuuacuauaaguugccuauauucugcaaaaugugagaauauguuauacuuaauuauuaaaauguauaguguuaaaaauauaggcgagaggaccagaaaauauacuauucuuuuauuuugaaauauguggcuguuuugcaaaaacaaagaaauuccugucauuccugucuauuuuuacugaaugaauuuuuuucgugagaauggugaacaaaugcuaauaccuuuuugaaagauuauguuaguaccugucauuaucacuaacuuuacauucauaaugaagaaauacuuugcacuguaaagugucuaaaguaucuuugcacuguaucuaaucuaaugucauuucuucauaaugaagaaauacuuugcacuguaaaguaucuaauagaauaucuagaauuuagagggagaagagacaaauacuugugccuuugaaugaauaauauauuuaaaauuacucaauaaacuuaaaaguagaaccugaccuuccuguucucauuugaguguuuuuaacaaugcaaauguucaucauacgacuuucuuuuuucaaacaggauaucauuauuuccuggaggguuuuuuagaugcacuacuauguggaaauagcucugaugcaggguaagucaauaauuuguguguaucuguguauauuuguauguacacauacauauguguaucuuuucucucuuuuuauagaaacugaagauaacagccaacuaauuuuauugacauuaauuugcuauauguaagguuuuugauaaaguaugagauuauguaaauauuagguaagauuuauguuuucuaaaacaagaaguaauacuuuuagacacaugcacacguauguucauugcagcacuauucacaauagcaaagacauggaaucaaccuaaauguccaucaaugauaggcuggauaaagaaaaugugguacauauacaucaugggauacuaugcagccauaaaaaauaacuagaucauguccuuugcagggauauggauagaacuggaggcuauuauccuuagcaaacuauugcaggaacagaaaacuaaguaccgcauguccucacuuauaagugggagcuaaaugaugagaacacauggacacauauagggaacaacacacacuagggccuaccagagugugcaaggugggaagagggagaggaucaggaaaaauaacuaguggguacuaggcuuaauaccucagugaugaaauaaucuacacaacaaacccucaugacacacauuuaccuauauaacaaaccuguacauguacguaccccugaacuucaaauaaaaguauaaaaaaagagaaaaauaucuauuaaacaccuacuguauauaacagcaaacauacaaaaagaggaguaauccuguuccuacuuuuuuaggaguauauaauaauaacaauguuguucuuuuagauaaguauauugagcuauaaacucuggagacuccauaguaguaaaaaugaaauggagguguugaaaaugcaaauuaucaacaaaaauuauuuuguaaaauauuauuagaaaugcugcaccauauuuuaaugaugacaccaaguagcuaauaagacuauaugcagucaaaaguugggaaauagauuaguuacuuauuugucaaacuuuuauuuugaaauaccaaaucuuucugacuaggcaauaucauagcauaguaucagaguaaaaaggcagcagaacgacuuguaauacuuucuuuuaccccacuugcagccaauguccagagggauauaugugugugaaagcugguagaaaucccaauuauggcuacacaagcuuugauaccuucaguugggcuuuuuuguccuuguuucgacuaaugacucaggacuucugggaaaaucuuuaucaacuggugagaacuaaagagccacacucuccauuuaaguaaaaguauacaagaaaaccaauugaguuaugaaauuaaaaccggaugauaauauaguagaaagagcagaacuugaaacgagacuugaguuccucuauccuauugauuauaacacauacugagcagagugaugccaaggauugcaauucucucccauuucuucuuggcucaaaaccuguucccuacccuucucagacacagauuguccuaaacagaaggcacauucucccuucagcccuaucuacccccucaaauauuaucccucaggugggaaguaaugaaaaugaaaaagcagauauagaaagauaacuuuggucuguuccuugacuuuccuaaaggcucaggucguuaauggaggacuccauggcauuuuauugacuguuucauucuuggugaauacaaaaauucugccauagaaaucauagugugaaugcauaagcuagaagagaaggaagaagcugaaguuaaagaaacaauaaaaaaaaaguacagggugcuaugaccaacauaauuacuauuuauaucugaguuuugcuagacacaugaguaaauugaaaguugaagccaccacuuagugaaauaauauugagaaauaauucugauauuuuuguuugcagacauuacgugcugcugggaaaacguacaugauauuuuuuguauuggucauuuucuugggcucauucuaccuaauaaauuugauccuggcugugguggccauggccuacgaggaacagaaucaggccaccuuggaagaagcagaacagaaagaggccgaauuucagcagaugauugaacagcuuaaaaagcaacaggaggcagcucagguaaagcugcccugucucauggcacugaccuuuuaucguucugauuguuacguaauauugaagagaaagugaguaccuaagagcaggugguuguaugaggaauuaauaaugauuucuauauuuugaugauccacuuacuuuuauuuaguuuaauuauuuuauuugagauguguauaauaauaaccacaauagaacucucucaugcuauuuuaaucaucuuaagauucucaaaguaaagggaaaauguuauuuugggguauuuucaagugagagacuuuuauucaaugaguagacuggcauuaggaggaaaucaucuuuucuuagaacaagaaauuauugguuaucauaugaagaguugcuccucuaguucuuaaacauagucuccuuuuuucuuuaacuaaaaauauguuggcuuuuaacgugguugcuuuauuaccuuuauaaggaagugaucaaauaauauaaugaucucugauacagcagcauccaauagacauaugaauguuaccaaucuuacacagauugaccaucuaaaaaggauuacuuguuuuuauagugaaguguuaguccucacagugugauaaaucauaaaaugccucuccuaucucucucaucuuucuguuuagcauacaaacuuauugucuuuacuaaagaagaaaguuguuucagaaauauuaauuuauaugcaagaguaauuaauuuaucgagguuacccugggaacaaugauaauaauaaaaaagugucaacuuaguaccaguacaagcuauaaucaaaaagcauuguuuuauuccaugcccaugugccccuuaagaaccaguacugauuugaagaugguggggacaguuuuuggagaacuggaugucuuaucuugcucagcagaaacuauugauucucccuuccccauucuucuggauauuguggaugggugagaaagggauuuuauaacuguccauaaauaggauuaauaauauuuugaggguauuggacaauccaauuucaauaacuagagaaaggaccucagguccuuaucccauuccccugccuuaaacucaucagcuuuucuuccauacucgaguuucuuuuucggagaaaagaaaacaacacuaauuaaauaccaauuuuuaaaguaaaucaaaucccaaaaaguaaugaauuuauuuucuuguugauacauguuggauauuuuugaauacguggucuguggagcauuaacagagacauaauaaauguuaccauggagcaaacuaaauuaucuccaaaagccuucauuagguagaaagaaaaaaaaaaucuccucuuauacuugcagagaaucuucucugugagaugaucuucagucaguucaauauauuuuuuaaaagccaugcaaauacuucagcccuuucaaagaaagauacagucucuucaggugcuauguuaaaaucauuucucuucaauauagcaggcagcaacggcaacugccucagaacauuccagagagcccagugcagcaggcaggcucucagacagcucaucugaagccucuaaguugaguuccaagagugcuaaggaaagaagaaaucggaggaagaaaagaaaacagaaagagcagucugguggggaagagaaagaugaggaugaauuccaaaaaucugaaucugaggacagcaucaggaggaaagguuuucgcuucuccauugaagggaaccgauugacauaugaaaagagguacuccuccccacaccagguauggcacugcugaguuuacugaugcaugguugaaaauuaaaacaugggagagagggggagaauuagaaaauggacucaggaauuuuuaucaacugaaucaaccacuguuguguuauauuuaaacccaucccuucuucacauaguuaugcaaaaacuuuacuccacagauauguaagucuacagcucgguguaguuaagauaacaccaaguugacagucaggagaacuggacugucauucugauacugucugcugauauuugucuauaacuaaugacauuuaaucuuuuugauccucagcacuuuuaagaaaaaaaaaaauguggaacuccggauagucgaucaggaauguccuuagguuauuuuaugauuuuauguuuuuuuucccccuaacuucuuuauaagucaccaugcaugcuucugaaaauauuagucaugguacacuugaucaaaaggcacaugacucugaauuucagaaguaugaacuucaaguuccaacaauacaaugccuuauaggugaaaaagaaauaauaauuaaagugauuuuagaaagguggacuaaaguaaauugugaggaguguugaaaguuuuugaaagacaagauccauaaaaaccaagguggccuuguuaaggucauggugccaguguucacugaauguuuaccacguccauugccauauucuaaggauguuucccuuugaacuugagaaauggucguucaggguguguguguauguguguguguguguguuucaauauguuaagguugcaaucuaucuccucauucuuuaaucccaagggcuagaaacuuucuuuuaucaagguaauuuaauuuaaugugaaugcacauaaaaugagaaugauaaucaaaaggaaugaaccauauucuguuaugaaugcugaaaucuccuucuacauaaucuugcaaaaugaaaucacauucaaauguccauauuaauaugacuuuauuuguuugcucuuucaaacuucuagucuuuguugagcauccguggcucccuauuuucaccaaggcgaaauagcagaacaagccuuuucagcuuuagagggcgagcaaaggaugugggaucugagaacgacuucgcagaugaugagcacagcaccuuugaggauaacgagagccguagagauuccuuguuugugccccgacgacacggagagagacgcaacagcaaccugagucagaccaguaggucaucccggaugcuggcaguguuuccagcgaaugggaagaugcacagcacuguggauugcaauggugugguuuccuugguugguggaccuucaguuccuacaucgccuguuggacagcuucugccagaggugauaauagauaagccagcuacugaugacaauguaaggaaguuuuaaauaguucaggcauggcuggcucacuauugcugcaccagccaguguuucuacagaacggcaaccuugagaaugauuccugguuggucacgcugugaaugcaccugcaucuuguaauaucuuuaauagacuaaccaacuaaaacuuaaaaccuuagcagucuccugcacaaaccugaaugcauuuacuuauuaaaagugcuaaggauugauuagacacaauaauuacugccuccaguuggaggauuugcuauauacccacacugaauuuagauagcaggacauucuccaaggcucugguaugaaaguaaaugaaugauucuauguuuaagugucaaggguauguaauaaaucuuuccaauggauucuucaagaucucugcuuuaguuuagauuuucaaaaacacugcuuaaguagauagcuucauuguuaccuuaauacuccuaguacucauauuuuucuuacuaaaaaaugcugauauaggucuucucaaaauuaaaugaagagacacaaauacauuauuaauacagacagauaaaauaauugucuguguacaaagguauguuauguguuuguggauguauacucagaugaggaauuucuaaacagaugcugccucuucuuagacuguuuacucacuuggaaauauaucagcaugaggaggcaugacuaagucagaauuagaugacuuauugcuuugguacccuggaugaaacuguuguccaugcagcauguguguguucuuuuuaacauagaguuuguguugucaaugaccaucuacaucuuguguccagaaaauaagauggcagcuaaguguguugcaaucauuuauacuuccuuaaaauuaaauagcuaccuucucaaaaaucaagugccuugaucacuuguaggacuuuuaaguuacuaggcuuuuacuauuaguucagaaauaaggguaauaacuguuaaauauaucucuuaagaguuuuaucaacuauauuaaaauuauuuuguauuuuauaaaauuaugaaaucaggaaguuaacaucuugguuuuugcuguaugacuaaaugguuaacaguuugaacauuccaggcuaaugauacaauaagucagaaauaucugccaucaccaauugaauaugaaagugcaugaugcauguguuucaugaaauucacugugucaccauuugguuguuugcuugucauauugcucaaauuaauuguuuaaugcauuagcauuuuuuuuuacagggaacaaccacugaaacugaaaugagaaagagaaggucaaguucuuuccacguuuccauggacuuucuagaagauccuucccaaaggcaacgagcaaugaguauagccagcauucuaacaaauacaguagaagguugguaacaaauucuauuuucguuucaauuauuuucaccaaacuuauauugucucauuucaaacaaauauauuugugaguugggaauagugcauucuaaugaaaagacagucuaauucaagagcuguuauuucuuauaucuacucagauauucuagaagccuuaacaauuuauuuuaaaaugagugauauugggacuaagaauguuuuccuaacuguguagcaacucuuugaaaaugcagaacaaagcauuucuguuagggguuucuaaucucauuagucauagugacccucuuuuuguuccauuaguuuaagacuucagcaguacagcccuuuucagccucauccuaaguacucucaagauuguagaggaagagcaggucauuuucacaaaauaaaaacaagcuaaaaagaugauucuugggucacaucaaucccuauucuagcucucauagucugagguugacaauguagagucauucacauaggguugcacacacaauaucuacaccacccuaaaccauguucccauugagacgucacaugaaagaccacucauuuaacuugaggccaagugcugagccacaaugucagugcauaagacaaaaaacuacccauuguuaccugggcucuaugugugugucugaugaaauauccuugggagguuuagaguaaacuguaauuuuuuuaacaaguacaaaaaagguugucucuguaacaaaaauguguugauuacugaaaauaaguuuaguggauaugaaauaaauguguguguauaaaguauaccuuuuggugguucuuuuuuuuuuuuuucuuaaucuagaacuugaagaauccaggcagaaaugcccacccuguugguauaaauuuuccaacauauucuuaaucugggacuguucuccauauugguuaaaagugaaacauguugucaaccugguugugauggacccauuuguugaccuggccaucaccaucuguauugucuuaaauacucuuuucauggccauggagcacuauccaaugacggaccauuucaauaaugugcuuacaguaggaaacuugguaagcauauuggaagguaaauguguuuagucuucaaauuuucugcuugaaaaacuguuuacauuuaauuguguauagcagucuuucaaccauccuucaugcuuccuggccccugcaaaaucgcaauuauauuuagcuggcuauacucuacuuuuuugccaaaaauaaucacccuuaaugugcucacaaaaacugagaaaggcauaggccuacagcacuacuugaaaagucaacagcaauauuuauaauuuuucaggauccagaaguagcucauagauuaagaacauacuuuuugagauauuauuacaauuucccuuacuguagaagauuaaaauaaaauuguggaucucuuuuauccuucuuagucaucaucacugcaagaaauaauuuaacaacucaaaaaugucuccagcuuuuccucuuccaggaucuaaguaguacauguauuguuuauccaucuauucuauaucaaaaccaugaacuauugaaaacuuccaguacauuuuguguguuauaugauuacaaaggucauuuuuggugaagauugccacuuaauuuuuccuuuuugugcuucaaaaacauaaauuauuaaaguguuugccagucaacucaacuuaggaauacuagcuuuuauuugcugaaggaaagagcuaucuaaaguaauuuaugcauuuccuguaauauuugguuugaaguuuaggauuuuugaugguagaaaacaaaagcaucaugcauaacaaccugcauuuuauuaguuauauuuuugaaguucuacuauuuauacuacagaaguaaauuuauuuuuuucaugugcauaacaaagaaugacaauaguaaugcaccuaguauaauagauaagaauguauaacucugauugagggaaauaggaauaagcuuauagauaaauaaaagugcucaugggcaaaauguugucaguacuugugguauauaaagucuggacaaaaagguaguuugguauaauggaaagagcacuguuaaaaauagaugacuugggcugggcgcaguggcucacgccuguaaucccagcacuuugggaggccgaggcggacggaucacgaggucaggagaucgagaccauccugccuaacauggugaaaccccgucucuacuaaaaauacaaaaaauuaggcgggcgugguggcgggcgccuguagucccagcuacucgggaggcugaggcaggagaauggcgugaacccaggagcuugcagugagccaagauggcaccacuacacuccagccugggcgacagacugacacuccgucucaaaaaaaaaaaaaaaaaaaaaaaaaaaaaaaagaugacuuguacucaaauccuaguuuugccauuuucuugcuguaugauaucaagcaagccauuucacccaucugaagaccucaguuuccuuaucuguaaaguaauaauuguauauuaucuacuucgcguuuccacaaggauaaaauuaaauaauguauaugaaagucuuucaucaacuacaaauugccauacaaauuuaaguuaguaauagaaucauugugggaaaauagcauaagcauuauguucuaagagcaaaucuuaugucauguauguuauuaucugguggaauuagauuaauuuuguuuugaucuuagguuuucacugggaucuuuacagcagaaauguuucugaaaauuauugccauggauccuuacuauuauuuccaagaaggcuggaauaucuuugacgguuuuauugugacgcuuagccugguagaacuuggacucgccaauguggaaggauuaucuguucuccguucauuucgauugguaaaaaaaaaaaaaaaaagcaccaaauucaaaaaccuuucuaacaaucaggguucuugcauagcaaugucauaguuuuuuugccacacaaccauuagcauuguaaguuuuucuguaacauuugcauugucaaaaacuuuuccuacauggaaaaaaauucucaauuauuuaugaaaaccuuuauuucaaagaacauaguuacguaaaaguuaacguauuacucaguugcuauuuucacuaaguauugcuucuagagacuacuacaguuaauauuucuagaccuaagaaaauauuuuuaaugaaaaugcaucaccuuuuaauaguaacuugaaaauauauauagcccuuuguagcaguggaugaaaaucagauguaagaugugcaugcagaaacuuuuucuaauucugucucuggaaaauaugcaucuugcgaaagucaaaggagagaaagucuguaggauuacuaagcaugcccauuaauucacacauauauccuuacaagucaggaaaauaauuguagaauuauaggaaauauuccaaguuuuucaaugcagguggauguaacuacaugaauaccccuaaggagcauuaaugaauaaugaacacuuuacuuauaucagggcucaguaugauguuacuuugcacacuacuggcaaauuaauaucuuucagcagagauauuucagauucagauguuaauauuauaauauccggccuuagaaccaccuuuauaaaacaaauuaagaacaguuggauuccaaguacucauuaaaaauucacuauaagaggccuggcuugguggcucaugccuguaauccuagcacuuugggagacugaggcaguuggaucacuugaggucaggaguucgugaccagccuggccaacauggugaaacuccgucucuacuauauauauauuuaaccaggugugguggcacgugccuguagucccagcuacuugggaggcuggggcaggaggaucacuuuaaccugggaggcagagguugcagugagccgagaucacuccucugcacucccgccugggugacaaaagaaaaaaaaaaagaaaaggaaagaaaaauaauucaccaucagagaaaaugaucuacaugguuaaaauauggaaaauccagcuuuuccuagggaguccaaaaauuagccaugagccugagacgguuagggcagaucagauauuguaagauauugaauucuaaugaccauuucuagguaaagcucaauauauauaaugcuuuuaagaaucauacaaauauauauuaaucuuucauuuuccagcugcgaguuuucaaguuggcaaaaucuuggccaacguuaaauaugcuaauaaagaucaucggcaauuccgugggggcucugggaaauuuaacccucgucuuggccaucaucgucuucauuuuugccguggucggcaugcagcucuuugguaaaagcuacaaagauugugucugcaagaucgccagugauugucaacucccacgcuggcacaugaaugacuucuuccacuccuuccugauuguguuccgcgugcuguguggggaguggauagagaccaugugggacuguauggagguugcuggucaagccaugugccuuacugucuucaugauggucauggugauuggaaaccuagugguauguacccacuuaagauaugcauuuuggaaauacaccagcauggcacauguauacauauguaacuaaccugcacauugugcacauguacccuaaaacuuaaaguauaauaaaaaaaaagaguauaauuuaauggugacuguuuugucaaaaagaaaaacaaacuaugauuauugguuuaaaaguccauuaccuuggauauauuaucacuuuaacaacacagcaauauagcagugccccugcauuuuuuauaccaaauucuauuuugucagucacuuuaucacauuuuuuaugugaauuacaauagaguaucauauugagaugagccuaaaaggaugugcugggaccauuuuauaaauucagagccaaggaagagagaagucuaaaaaaaguagagagaaagugcaaaauuaccauccagacuaggacuaaaaaguggugucuuuaagaguucauaaugcuugugccauuucuuugccccauugcagcauaugauauucaaucacucuaugucauauggcagaugcacuagccaaccugaguucaucaguucucgaauggcuaaugaugccugagauuaccauaauggaguaacugaucaaucuuuaucucucuuaaauuuggaguguuacuguuuauaguauaguaauacauaaaauauucuaaagguauguacauucaugugccagucucauggaaauaugagagauuauucauaaacagcucuacuuagucaacaaugaaguaugagaaauauaauagauuaagaaaacaagugucagccuauguuaagcuccuaaucuucauucugaguuguaaugguuauuuuucaauugacauccaauuuaauaucuuuguuuauugaaaaauuauagaaugcauuuaaaugcauacuuggaaacauuagugauuuuuaagaauucucguauuguacacauauaaaucuguuuucuucuacucauacaauuuuagaguuaacaaaaccuuagauuagcucauucaauuucacuuuacgaaugggagaacuugagagcaacagaaaucaugucuuuguccaaggaugugcuauugagccagucacaaauucagaucacccaucuucuaaucacuaugcugugguguuuccuucucaucaaguuuuagaacuuagaguuuuuuccacacuuaaaagaaagaauaagugauuguaaucugcucuucccuacauugguguaaaauuauaaucauguuuuuguuguuuuuaagguccugaaucucuuucuggccuugcuucugagcucauuuagugcagacaaccuugcagccacugaugaugauaaugaaaugaauaaucuccaaauugcuguggauaggaugcacaaaggaguagcuuaugugaaaagaaaaauauaugaauuuauucaacaguccuucauuaggaaacaaaagauuuuagaugaaauuaaaccacuugaugaucuaaacaacaagaaagacaguuguauguccaaucauacagcagaaauugggaaagaucuugacuaucuuaaagauguaaauggaacuacaagugguauaggaacuggcagcaguguugaaaaauacauuauugaugaaagugauuacaugucauucauaaacaaccccagucuuacugugacuguaccaauugcuguaggagaaucugacuuugaaaauuuaaacacggaagacuuuaguagugaaucggaucuggaagaaagcaaagagguaagauucuauaggugugggaagguaugaauacauauacauauauacauauacacacauacagaugauccucagcuuaaugauguuuugacuuaagauuuuuuuuuuuuuuuacuuuaugauaauacaaaagcaauagccauucacuagaaaccaugcucuaaauuuugaauuuugaucuuuucccaggcuagcaauuugugguacaauauacucucaugcugggcaggggcagcaagcugcagcucccagucaaccacgugauuacaaggauaaacaaccaauauuuaccguacaguguacuguauucaggaaauuaccugaguuauccaacaguuuauuauaaaucaugcuuuccuuuagaugauuuugcccaacuguaggcuaaucuacauuuccugagcauguuuaaaguagacuaggguaagcuauaaaguuugguaguuagguguauuaaguaaguuuugauguacaauauuuucaacucacaaugaguuuaucaggaacuaaccucauuguaaauugaggaacauuuacaauacaugcauuauauugccuguauuuauuauuauauauuuuccauauagauuuuuuugacaucauguaaaauuuuauuucacugaggaacaaaagauuuaacucggaaaugacugauaaauuaaaggguaauauaguauacgugugaguuuucucauccuuaguaauggauauuuguuagaugaaugaaugaacgaucuaacaaauagacaaacaucaucagauuuaauccuuacaauaaccuggaaagaaauguguuauuauguuaacuuuucagauaagaaaauuagcuuagggagcauuaggucacauagcuagugaggggagugccgagaguugaacuuagagcccuuguuuacaaguucuguuuauuguuuuuugcaucacauuggcucauguacauugaagagaacuuaacaacaagaaauauucuuguagcuccuucaacuaaaauuacacugcccuaugcauuagccuguuuggacugccauaacacuauaccauaacuggguggcuuaaacaaccaaaauuuauuuucucauaguccagaaacuggaaaguccaagaucaagauaccagcagcaucaaugucuagugagggcucacuccuuggguugcagacagccaccuccuugcugcguccucacauggccuguccucaaugcauguacauggaaagagagagaacucuggugucuauucuucuucuuauaagugcaccagcccuaucagaauaaaguccaaccuguaugaccucauuuaaccuuuaucaccaccuuacaggcccuauccccaaauacagucauauugaagguuagagcuucagcauaugaauuuuguggagacaaaacuuuaauccauagcaaccuacuuugaaauauuaaguuaaaagucuaauggauauauaagauaauuaacaaggagucuaggacaaagcaccuuuacuucccauuuaguguuuggaaaucucaaaaacagcagggugcccaucuuuuaggcuguauagucuaaauauuuuaaaggauugaauacauuaaagacauuuuauuagagauacaauucuauuagauaucaucauguccauugcauuuugauaguuguccauggaagauaccacagguaugugacauucuuuugauuuagugacuauaucccuuaaaagaugcuucaaguauuuauaaugagucucugaauaaucuaggucagccuccacuuuuaggaguagggggcuaauauuggagcuggaagcagcugcccugacccuagcauuagagcugcuuaguuaauucagauuuguuugaugagagaagggaaagaaauauagugcagagauguaauaguagauagauccugucacauuuccaugucuauggaaauagauucaggacaaaaaaaaaauagacuguuuuuaucaaauauuguggacuuuuuuacagaaauuuuaauuuggauauuaugucaguucagacuuuguuuauuugaguuuuccuaaggaaucagaugaaggcuaauuuuuugaaaaauuguugucuuuauaaaauuguuucugaacuucuguuaaaauaaauuuaguaauagccuagucuagcuuccuuugucuugaaucuuuagaccuacauuuagcauuugaugaggacuaauggcuaccauaugcuaucuguuauauuaaaaaggaaaaagacuauuuuacaaagaccauccauaagauauacauuuucuguaaaaauuugacaugauucuuacucuuauuguuuuuuuauauugaucaaggcuaaaagaaacacuaaccuuuuuauaaagcaacuauccacugaagcacuagagguaguucuguuucuuucuacuuugugguauuuuauaucuuggaacauugcauuaauugaaauuuuaaauguuaagguaauagaaacuuuagagauaauuuaauguggugcuucucaaauugugagucauaguuuaguuagacuugagaaaucccuuuaauaggccaguuuuuuuuuuuaauuuuaaugaaauagugauccgcccaccucagccucccaaagugcugggauuacaggugugagcuacugcacccggccaaugaaauagaacagaauaacguuagagcacauuucaugucagagggagaaguccugguaaaugaagcuuuugccaccugugcugaacuuuaauguuuuguuugucuaauuagaaugcaaccacuugguucaugggcauagugucugaaguccaggaguucuuaagcuucagaaagacuguuucagcuuuuugaagguagugauaaugaagccuuccuaacccuaggcagaacagauugcuuucuuuuuugguucccagagauauaaggcauagaguauaguaauaaauaaugcaucuucuugacucaugcgucuuacaaaguacuaucauauuuuaggguagcuacuuauaugcaugcaugucucuccuuuuauguggugaccuacuuaaacauguuugguacaaaguagacacucagaucaaacuuuuccagcucauucaacucuucuuaauaaaaccauucugaagggcucucauaaauacuuucucugauuagagcauacuugagauugucauuuuaauuccaauuauuuuggaccaauuuuuucucuagauucaagauucacuugaguuagauuuuguuguuuuuguuuuuguuagccauguuaccuugucacuuuacaccacccuucuaagaaaguaauaaucucucaucuuuuccacaugaauugcuguugaaaugcaguuguaucucauccagacgaaauuuuguaauuaaauacugaaacuucuauuuauccccuaaugauacauuucaauuucuuuuauucauuuuugaaucuggcuuucuuuuuauauucuuucacagauuaccacauuguaucaaauuuccuggcacuuuuacuucacaauuccuuucuucuuggucagaaauaaacccacacaauauuguuugcccucauugcuucaucagucuuauacuguauucuguucaucaaaguaaggcauaaauuaugagauauucugcuuuuagaggaauuaagcugacagcagaugccccaauagaugaagagucuuuguucuacauuaggaaugcugccuguaguauauuaaucucaucauuuugguucuuuuuguuuuagccuuuauucuuuuugccuauuuucauuuauuuaucaguuaucauaugccagggagacuagauaaaggaguauacuaauaagcuauaaggaaugauuuucucucucugucucuguguguguguguguguguguguguguguguguaugacuuucaaccuuuaaguaugaauuuucauauugagacauauguuacugaugcaaaaauguuaccuuucauggccucuauuagacuaguuucauuugaacauguuauuguuuccauuccugaauuccaguaaugacuuaucuacaaugcaucauuauaauaccuccaaaauuauauuaaugccuuguguuaaaauuacaagugcccacuguuuauucuucauacacuaaauauuuguuuuuagacaugugaggccacaguuauaaaguugguaaaugguuauacucuggagccagauacuggguuauauaauuucauuuuagccgcuuacugugugacuuuaccuaucuaauaaucaguuuccucaucucaaaaaugugcauaauguuacugacugcauuucugggacagaguauuaaaugagauaauaaaugugaaguacuuagcacagugccuaauuaauauagaauaucugguaaaucaucauuauuauuguuaccaguugcauuccacacuguuccaguaaguuuucuuacaagaauuacuacugguaacauacuccacuauuugucuuuuuuuguuguuugccuuuugcccucuguaauaaauuguuuuauaaguuuaucuggggauggugauacauuuuauauuuucuguuuauuuuuaaauuguuuugauuacauucuugauaugguaagcuccuuaaaauauuuaagaaaauuacuuuucuaaggggcauuccaaucaggaaauacaaacaugcagaaaccuaaagacaggaagcaagaggauguauuuggagacaauuaguaguuuggaauuccgggggcguaaaucacaggagcugaggaugagauguagguaaagagucuugguuuccaggaagcaagaauagacugguaugaagagauguggugaacuggaaccucauauuuauuuugccucuuacaucuguggugaacucacaccuaacuauccuccauuccagagcaaacuaagggcuguuuuuucuacaccuuccuccuauuggucuccaaaagaagaaagggaauagcaugagucacauuucauccucucuuuaaguccuaagagacuucaaccuucaaaguacauucaaguaauuugaggaauuguuuuuuaaaaccucagaaaauuucuugacucaugccauaguaggaauaaugauaagcuagaaacaugaauuuuuauugaacauuaauaauaaagaauggugacuuggacagaucugagagagcuuugaaggcugggcaaaacugccaagacuaugcaaaagacaauauaaaaucuuaucuccccaaauagaaaguaaauuuauuuugguuuuggauaguauuuuauaacauuucuauccuccgaagcaccuaccacaaugcugggugcauaacaguugcccaauaauuuuuugagguuugguugauuuauauggauacuagauuaagagcuuauaagccuuaacucuacuaugagcaaaucgcuaaaucuauauuaccccguuuccuaauuuauuaaaugagauaucuguccuaugaugcuuauagaaauguuaugaagaucuaaaagcuauuuggaaguuaaaaauguucaaaaguguaaggugaugucaagaaaauuacuacuuaauuccauuuaaauaaaaauuuuaaauaaauugaguuauuaaaguuguaccuuuugggaacaaaaaaggcacauuacuaaaguaauuauaaaagaaauacauuuguuuuugcgaugagugagcucuagaauaaugaguaaaaaugugagguccuuaguaauucagguuauguuaauaacagcuauuguuuaaauguucaccauggacaaaguacuauuggagggcauauauugucccauucagucuuuaugccguaagacacacuguuauuccagccuuaagaugagaaaaauaaacauauuuugaacaaaggaaaacuugccaaaguuacacaaacaguaagugguugguccuggcagucugcuccauagucugcuccagagucacgcucuuaaccgcuacacuaaaucuuaauagugucugaaaauguacuuucuuuggcauaguucugaaauaaauaauacuauuuguugaagaacuagguacaggugucaacuauagauuugguguuaacuuccaaucacugcacauugggcauagguuaacagcauagucuggaguguuucagaguccuccugcuuaguccugaaagguccuguuccucugguacuggccugcacuuuaggcugaucugcuucugcaucccacacugaccugugguggucuaauucuacuuagagagcacuuagucucccagagugugauaguugugcuuaaggagcauccccuucugaguuuaaagcugcuggaagagucuuccaaaucauuaggaagaacuucuaugauguaucauuagcuuaugaggucuuugagaacaggaaaaacacuaacccugucuucccuuaaguccacagcacauacaacauauuuauuaaaugaaugaauaaauaggugaugggcaguuacuucuagauuuccauuuuuucccaauuauaucacugauauauaugcauuuuaaaucuacuuguugcuuugcugauauuuuuccaucuaauacuuuuaucuuacguuauauggguuaaggaacauacgacaaucuccaaccuaagcacauagucucuaagagauggcaacuacucucugcgaagaguacuauccauggaacccaagaguacuaucuccacuacuucuaauugaucacuagggacugccaaagcuaccuaucuuuguccaccucucugcauucccaaggccuuuacccagugucagaccuccaucaucuuccaguuuuacugcuacagccuccaaacgggucuccucucgcuaguguagucuugacaaaacaauagguggucuuucuaaaaugcaaaucccguaaccguucuguccucccuaaccuuucaggaguugcccauugcucacaguauggagucuauacuacuuaacauggguacaagucccugcaaaacugaccaccgcugacuccuucaguaucauggaauaguacaccucacaccuccccacccagcuauacuaaucuuucauucaauguaauucccuaugcuuuaucaguucucaucguuauaccuuuucucucugacaggaauacucucuuacucuauccugcuucaccugacucauccucacccaccacauccuucuugucccaaaugucacuuuauucuacccuguccuuccuagauugagcuaggugguguucucaauauacucuauacuacuccuauuagaguguguggcaauugcuucucuguauccuccaucugauugugaaccgacgagggcagauacuaagucuauuauguucacuauuuuauuuuucaaguccuaguuuugaugccuggcacauuuuugguagugaaaaaguucaaauaucaauaauuacaccuauuacaaacaauacaauacugugauggaaauuguuaccauuuaucaaauaagcauacgccaaacguuauucauguguuaucuuguucaguccuuauaacaaggaugugaaguaagaaccauuuuacaaauuagaaaccuaaagccuaaggaggucagaauaauugguuaaaguccauaaaaccagugauugugauucaaacucaaguuucucugauccucugaacaguaguacuuucaacucuuucauuauauagauauacaguuuauuugcccaguagacacuuauuaaguauguuauaauuuaacauuaaaaaucaaugucaaaauaacauuauagaagcucugugcucaauuuggcaaaaugaauuuaacaaugaaaauuacucauuugauuugcauuuugguuucuagcuuggggauuauaaaugcaauuuuucagaauuuuuuuguuuucuuuccaauuuuuuuguauuaccaugauuuucuauugacucaauaugucugaaauauguugcuuuuguucccuuauauuuaauuauugauacagaaguuuaugugugaccuaucgaaagcaaaauucagaguaguauauuagagccguauuccuccacguucacuuuuauacugggcaaguguuugacuaaagaauagaaacaacugacauucuguaaauaugaauaaucacugaagauuguccuuucaacauacagcuugaugaagaaaucaacugggaauaaugugggaauuaaugaguuaauauuugaguuuucuagcugcccuguggaaauguugagucucauuacagugucuuuuccauugauauuauauuuuccuuuguugagagucuuuaauaggggucauuuuaauuuuuaauaugcauaguguacaauagaaauauuuacuagugcacaauguacacaaugaaauauuaauacuagcauuucugagguuguagagaaccucauuuuagcaugacuuaggagauauaugugucacaauaguaaaguacccagcauuaaaauaguaccuguccagcuuuaaaaauaaguacuuuggauaauauucuuuauauguuaaauauauacauguguauguuaaauauauauauuaaauauauauguacacacauauauacauauacaaauauauagacaucgcaugaccacauauuaaguaugcuuuugacccuuaaauuccagauuuauuuauauuacuuauuauaauuugaacuccuacuaaacucuauaaauaagcuccuuauaacaaaccaaguuuaaaaauaaaaauauaaacauuguaggaucaagucagagaacaagaaaaaaagcauuuaaucacuuacucucagagaauauugaagaaaguuuucuuugccuugcuuuguuuugccuuacccucaaggucaaaaucauuugcuauaguaaagagcauuguuaaaaaacaagaaauuugcauaaauccacugcggaggaaaacugcucuuaccaucaggguuguaguuauuaagugguuauugaaugcccugguguacaaggcaaaguggaugcuucauauacaacguggucucugcauucugucagcucacauauuaagucagccugccaaaaauacauggaugauacaagucaguguauaaguguauaauuuagcuauuaagauucaugugugaaaauauacauauucuuaaauaaacuagccuauuuagaaauugguaaaauuuaagguugauucaugguuuaauaaacauuaaaauagauuuuaagaaauauuccgggaggccgaggcgggcgaaucacgaggucaggagaucgagaccacccuggcuaacacggugaaaccccaucucuacuaaaaauacaaaaaauuagccgggugcaguggugggcaccuguagucccagcuacuugggaggcugagacaggagaaugacaugaaccugggaggcggagcuugcagugagccgagaucacgccacugcacuccagccugagcgacagagcaagacucagucucaaaaaaaaaaaaaaaaaaaaaagaaagaaagaaagagaaauauuccauuaaucucuaaaacagugagaacaaauuacuuuauuagugaauagcaaauuucaaaaugaaauuaaauuucaaucuaagaacaaaaaaggaaaaauuaauuggccuuacugauuuuuaaaucuguaaaaauacuuauuugagaauauuuuaguuuugccguuauugaauuucuuuagaauuuuauaugaauucguauuucaugugcuaacauagagguggacuuuuccuacacaucugaagaggagcuuuuccuucccuuuuugaguauuuaauaauaauaguguuauuaucccaaucaaauaaagaauuggaccacuucaucuuuuaucucaaccguuauaagaauauauugaugcaaauauacugguuaugaagguuuuaauacaacuuuuuuagccuaugguaaaauauuuuaaaaaauagaugacaacauuuagauuuuggauaauauuaauagcaaaaguaaauaugacuguauauuaucucaaaaaacauauuuacagaaaauuuuuauuuucaaggguucauggaauauuucuauaaaaguaaccauauacuggaguucaaaguaaagcucaauaaauuuaaaauagcuggcauauaggguuauccagucacaauguaguuaagccugaaauuaauaauaaauugauagaaagaauuccaaccauuugaaaauuaagaaauugccuccuaaacaaauauugaauaaaagcauaauaaaauaccaaaauagcuauuucaaaaauaaaagcauuuuaugucaaaauuuguggaagaagaccaaguagucauuaauaugacuuaauauuacuaauaugauuaagaagggaugaaagaaccuaacaaauaucuuugagaaauuagaaaaggaacaaaaaaggaagaagauauacauaaagagaaaaaauagugaauuaucaauguagcagacaauauugguauaacagguuaugguucuuaggaaaaaaaaaucaguaagacacacaaacuuugguguaucaggcagaauucuaagaugaucucaaugacacuugcccuuguauaauccccacuccaugagugugguuggaaccuguggauaugguaucacccuuuaauuacauuacauuuaugacaaaaagggggaugaugcugggugggccugaccuaaucaggcaaacucuuuaaaugcacagugauuucuccugcuaucacauagaggaagcugaaaagauaugcucugccuggccuagaaaaaagcaaacacccauauuguaaauugcauacagcagccauguggccagagacuauggguggccucuaguugcugagagugguucugggccaugagcuggcaggaaaguaggaagcccagucuuauaauuaugagaaaugaacucugccaacgacaguaaacuuggaagaagauccugagcccuggaaaagaacuggauuuccagccaacaccuugacaucaucucaaugagacccugagcagagaauccaacuaggcagugccagacuuccgaccuacagaaacugugaguuggugaauguauguuaagaugcuggguguaugcucauuuguuacacagacacagaaaacaaauacauuuggcaaauaauccuuguuaggaaaacucaaaugauuuucuauguguaaagagcaauugcaaucaaauaagaacacuaauacuccaauagaaaaauaggcaaaagaccaagcaccguggcucacuccuguagucacagcacuuugggaggccaaggugggugaauugcuugagcuccggaguucaagaccagccugaggaucagaugcugucucuacaaaaaauacaaaaauuagccgggugugguggcaugcaccuguagucccaguuacuugggaggcugaggcagaauugcuugaaccugggagguagaggcugcagugagcugugacuucaucacugcacuccagccugggugacagaaugagaccugucucaaauaaacaaacaaauaauagucaaaagagacaagucauaaaaaauauaacuggaagacaaaccuuaagaaauauuacuccuaauuguuaucaaauaaguuaauaucaaaacaaugguaguguaauuucugcuuuucaauuuggccaauaaaaaagaagaaacaaaagcaaaacaugaaaaggaaaacaaaacaaaaacccagguaaauaaugcauuaugcugaugaaggagauccaugagacagauacuuaacacaaaucucagaacaugguaucuuucaauaaauguugaguaauugaauauuucauauacagcuaauagugaaauuaaaagcccagcuacauguggaugguuucuuugucucuaaggugggaauagcuauuugcuucuccuuggucagagaugaucacaggauuuuucauuuauuuauuuguuuguuuguuuguuuguuuuuugagacagggccucacucggucauccacgccagagugcaguggcgcaaccacagcucacugcagccucaaccuccugggcucaagccguccucccaccucagccuccaaaguagcaugcaccaccacauccagcuauuuaaaaaaauuuuuggccaggcgcggugucucacacuguaaucccagcacuuugggaggcugagguagguggaucaccugaggucaggaguucaagaccagccuggccaacauggugaaacccugucucuacuaaaaauauaaauaauuagccaggcaugguggcaggugccuguaaucccagcuacuugggaggcugaggcaggggaaucgcuugagcccgggaggcagaggucacagugagccgagauugcgccauugcacuccagccugggcaacaagagcgaaacuccguaucaaaaaaaaaaacaucauuuuuuuuucuuuuuuuuaguagggacagcaggaucucacuauguugaccagacugaucacaggacuuuuuuagccacagucccaacauguuacccagacugugcaggcccagcagccauacccacucugaacuuccucauccuuuucuccuccugaguccagaucugcucccucaucaccuucucaucaguccucacuucauaucucucuuggauuuaagacuguccaaauguaucauuucaaauucucaaacacuacaaagucauagaaaauuaaagcuggaacuuuaaagaucaucucuucauuuuacauauuuaaaaaaugggcuaaaggaagaauuauuugagcaaagccacgcagaaaguaagaggucaaaccaggucuggguuucuuuccaguuuauuguugguggcuuucuuuccacuacuguggccugggccaggagaagggugaaaaaauaagguuguuggcuccacuggaggccauaacuuguuuuaaaaguucuuggaauagucaauucagaaauggugagugacagaugugguuuggcuguauaaaguaauuuacaucaucuacuuacuccauauauggaucauuuuaccacaugauaauguauacacauauucugcauauaugcaaauaaaaugaccaauaugcauacuuauuguaaugagguauagcuauaaaauauucauagaggcaccauguugaauuuaaaaagagcuuuaaaguugagaauuuugcauccuaguuuguuuuuuuuuaaccuauugugugcuuuuugccaaaucaauuauacuauccaggucuacuuuaccaaucugaauauugcaguuuucugaggucauguucaauuccaacuccucucagcuucuaguaaaaaaccugaguauaauuugucaaguuuaccugauugguaguauauguuuucacguagcaaagcuuucacauuuugcugcuucuguaagccugguuguugguacuuaacauuaaaaagucagaacuacuaauuauuuauuucuugaagaaaaaagaaaacauuguaacuuuucuaaaaugauucggugugacaugaucaccagagugacaucccauuacuuuugccacauuguauugguuagaagcaagucacagguccugcccauacauaagggcaggggauuauacaagggcaugacaacaguggccagaaauuuuggagaccaucuuagaauucugcuuacuacagacugucaugaagaaagcauguuugcagacauaaagaagagauucuuacaugucauucaacauacugucaauucuucaaguuuauagauuaaaccccugaaauaacuuuuuuaauacccacaaagauacugucucuucacuugguauuaccccgccccccaccuaguuacuagugguguuggugacaaauucuaaacuuuaagagccuuuuuaaaauaauagcucuuugcauuagcuuagugccaaguuguuucaucugaaauugcuaaaucuugaagauuuuuuucauuuuaucaccuuuuuuccacugaaauucaugauacuaaauuccacauaauuuccccuauauucaccacacauauuuuuucuuucauuuaacaucaucuucuuaaauuugggcaugcauuuccccaaauuuugauucaauuaugguuuuccaauacauuuucaaaauuuuuuaaauuuucauuuauguauuuauuuauuuuagaaaugggauccagcuauaaugcugaaauuguucccaaacuuauaaguucaagcaauucuccugccucagcuucucaaguagcugggacuauagggaguuuuccaaucuuuuaaauaauauuuuaaucaaauuuuuucauguaucaugcauaaauuagaugaaaguggaacuucccugcuugaauuaaagccuucagccacuuaaggcuggagugagaucucuggagaacauuggcuggaaacaccucuucugucauauuaguaggacagaugccuuucauugcaacauacauacugaauguugguauaauuguugauugaaauuuagcuguacaacuuaugaucugcagaugauagacuuucucuaaguucuaaaguacauuaaagacuaagcauauagcauuuuagaaauaauuuauacaaauuauguguuuaagcuuaaugccuuucuuguuuuuauaaacuuacuaucaucuuugagaaggucugggugacuuuuauauuaauguuuuuauuuauuuuaaucuauugacuauguaaaagguuuacuauuuguuuaauuuaauuuuaauuucuguauuguauuccuuauuuaacaugccaaucaaaacucuuguuguuccccauguuuuggcuaaaaacaguuuaguucggucacuugugaacuuauuuuauuuuguuuguuuuucuuuccuuucuuacacuaaugcucauuuauuuacauuauauauaaauuucuagaaaaagcacuaacacuucucucagguuaucauaguuuaucuagaguaauucauugacauaagccccacugcuuaugguuuaaucuuucuaauagucacaugucacuuuuucugauguuauuaugauuugaaaguaggggaaaauucuucuuacuauuaugagaaucagggucuaucauaaggguuagccaugauguggcuuaccagccucccuuugcaaaaugcugacuugcgaaguagagcuuaagccaaauaugaauaccauuuuuuaaaucuaauuuuuaaucauauauuguuccugaaagauguauacacuucucuggaucccaaacauucaacugcuccauuuauuuacaaaauaaaaaugacauguauaaaaaugucacuuuaggugccuuguuccagcauggguucauuguuuggagugcuacaucaauguuuuagcaugagcugcacuuguaauucaucaucuauuauuucuguuuaguuuuuuuuuucccccagaggacaaauaucuuaacgaaucauauaaagcaaccugaauuuaguaucuucucagaaauuuauauuuguaacuauuuaaaaaguaaauauucacaccuaauuuuaugguuuuuuaauguacauguaucuaugugggggauuuaccgguguuacguuuauucaaugauuuugacuuaguuuuuauaaauacaacaacacuuuuuaaaugcauuuuucaaauucuacaagauuaaauuacacacuuacaguauuuuagaauaguguaaauugauuugaaaauaaacauaacuuauucuugauaagcauaccauucagcuggugaaaauagaaaugugcagauauccuaggcaguagccaacgaccugagcaauuuuugcacaucaaggucaucaguuauuguauuuuacugagaaaacugcaagugucauuaauuuuguaaguaaguccauuagaaugaagagaaguuauaauaaaauauaugcccaaaguagucccuguaaaguguugaaagggguuuaaauaagagagcaauuauuacucuuccgcaaugaugggaggaaaaaucacuaggagaaaaagucagagaacauuaagaaguucaccuugggccgggcgugguggaucacgccuguaaucccagcacuuugggaggccgagacggguggaucacaagaucaggagaucgagacccuccuggcuaacauggugaaacccugucucuacuaaaaauacaaaaaauuagccgggcaugguggcgggcgccuguagucccagcuacuugggaggcugaggcaggagaauggcaugagccugggaggcggagcuugcagugagccgagaucgcgccacugcacuccagcguggacgacagagcgagacucugucucaaaaaaaaaaaaaaaagaaguucaccuugauuaacauacagcuucuaucugugaaagacaaauuugggagauuugguuggaacucuaaguugaaaacaaaaacuucauccaucacuaauaucugaaacagagguauucaucuauucauucauucaccaaauguuuguuagucauucaccauacauacacuaagcuuuguggaccacaaaggucuaagucacaugaggcuagaaugaggauggccauuuuuauuuauaguuaaacaaagaaaagguaacaagaauaaacagaaauuucauaggaauuuggaaucugacugagaaaauaguuauuucagagauaaaauaaggaaaacugacuuuugauuacugccaauguuugaaauaaguaaaaguaaacaaaaaaauuugagucugggugcugaaagagugauauugcagaaucaggaauuugguuaaagaaguauguuuaagauuguuuaaaaagucauuacuuagauugagagcauacuaaauuugaguauuauuaggcacaccuccacuuuccuacaguaguucagacagacuguagaauauacuuauauugcuuaaaaaauguuuuaaaauuaauuuguaaacauguagaagaucacuugucuagaccugcgaacuuuccaagugcagauauuccauuggaaugcuaauaagggcauuugaucaucuuuuaaaucaccuuaaaauuucugaaauauggagugacuccaagcucuaugcauuaaaaaaagaaagcacacuuagaaguauauuguauccauccauugugacuaucuuuggcuuugccauuaauguuuuacaauuuggagaaguaacacuauucaccaauuccuggaucuacagcccacccauggucccaguuuguuuauaaaguaguccucaugaaauagcaaaguuauucagaaacauuuaacauauuuuaaauauaagauaauuuagaguucauauuaucuuguaauguucauacaaucauacaguucauacaaucuuauguuauuaauauccacuacauucuucaagaguuaccaauguaauauggguacuuacaagcgcuugcucauguacuuaaaauuaguaguaaguuuuacuuuccuaacauuuaguagacaggguagaguucguguauguccaauugcaugccaacucuuauauuguucaauuuuccauuuugauguuauucucauauuguguuacaucaucauuacacuaucuugguugaguaacucaaagggauaaaauaggaauggaaaucauauaaacuuaaaacucagguuuuuuugugaauugagacucuaaugaaaaaacaucagaagaaccauaaaucuacauguauuuuuaaaaaguaauucuguaagagugaccaucuuagguaagcauccuaaaaauaaaugucuaaauaagaaauauaagaugaauaucugaauauuaaaacuuauugaacuguugaucuauuugucuucuucagagaaugccauuuugaaaaugugucaaaaaguaacauaaggucuuuuggguucucguaauuuucacagaaaauagucacaacuuagguaagucagauaagucuuugucuuagaaaaaguaaaaaacaaugcuuuaauucauaaagugaauaagugguuucacuuaaaggcagaauaaaaaucaaugcuucagagguaucauuaaaaguaguauuccucauaagaaaacaaauaugguuggcaaaaaagcaaaacuaguuauuggcaauacuuuauuaucaguguaucaguauacuuuaauaucaugcaauaacaauugcaugauauuacuaguaaucaaggaagaacaauuuuuauguacauguucaugccaggaucuaauucaccuuacaauuggauaaaacacuuaugugcaaagaaucaaucauuuaucuguggcacuuacaugaagauuaauuacugagcaacuuuuuguucugcuuauuacugacaaccuauacugaugaagaguagauuuuuaugcuaauauucuauuauuuugugagucuugguauagacuggaaaacuauguggggaucagaccuagcagauaacaauuauauauauagaagguagguuugcuauuauaauucuuuguaccugaaugccucuccacacaaauuuauucacaggaaauaauauccuuucuaguucuuaauuaauuuuggcgaaaauuguuaaaauucucaaauuccacucucuaauuguuucaugaagaaugggcauuugcuuuucuacagugaagaacaaugggugaugaaauguugcucacaugguuuuuauaaaguauguaaugaauuucauuaugucccggauagugccaaucaaggucauuuuuaaaauaugaaggcacuuguugaagugacaagucuuagccuaucacuuuacggccaaaugaugaaucuguguaauguugaggauaagacauaagaauuucuucagaagaucaugugauguuaugaguaguuugauugagaaugugacuaacgccugccacuaggugauucucuucguuugucagaggaagaaaccaaugacuuauuccuggauauguuuuaaauucagugcaaaugcuagaacagaacacaaagauagucaaagcuaaaugcaacccgaaaguagauuaugaucuauuuacuacugucuaucauguugaacaaucaacuuuucagcuucugagcauaguaugcaggccuauuuaauguguuagaauguugaaauuagucuucagugagaaauauuuuauaauuucaaagaucaucuucaaccugaauucacagagcuaugacagagcuacaugccauuauagguccuaauuuucuguaacugucagguaaguuuuucuauuuuaagaaauuaaaaggaaaggaaagaaggcaacuagauauggacccagacauauaagcuauccuucuucaagcaaauacaaauauuucggugaaacuuuuacugaaauaucaacacucuccuauguaugugaaauucauauuaacaauuuuaauauuguguuuaauuuuuacuauuuacaauaucgugauaacggguugaauggcuugcugcugugugcacuggaaugccuauugucgggucuacauaagccugaaguuuagaaaauacuguacuagauuugauacuccaauaaggacaauagauauuucaguuaucagugaauacucagcugguagcauauuguugguguucaaaaaauauuaguugaauaaauuaaugaauuaauuacacuugccaaaaacuuauaagccaguuugcuggucuucagaaagagcgucaugaguuuuuccuaucuuaauauguuaguuaauauuuucuauuaucucugccaucuuugucuucugagaacucuagaaagagaaaugugcaucccaucacuauugucaaaauaugaaggauauuguuauuguuguuguuguuuaacuagauuuuguucuuucagcuucacauggcacauuaacauaaacaugauuugucagaggaaacugaauuuucccacacacuauuuaucucauuuuacaacacuucaggcucuaaaauacuugccagaaauugaagaugucuauuuaauaucucuaagguuguuuauugauguaauuuuugacauauuuuauaacaauuucucuccaaaugaccacauuuauaguaaauaacucugaacaccuuaaccaugaaucuuaguaacauaagugaaaacaacagguaguaucuguacacacagguaagacauuguuaaagaaauauguaaagucaaacauuaaacugcagaauaaccuaacgacauuauuuucuucuaagguaagcuuucucuuucucuccugcuccuuuucccuuucucuuccucccucuucucuucccuguguccccugcuucucuaauccacaaggcaguguuuugcucaguacauguggcugauggccuuuuguaaccucauaacauagcaaucugauuucaagcuuacauugugaauuaugguaaaaggguuagcacagacaaugauuuucuuauuucuuccccuuauucaaucucucuuuuucucuaaaaauaucucuaccucaagaagaauaaaaaacaaauucauaguaauaauccuuucuuggcaggcaacuuauuaccaaaauuaaaggacuuuacuuucuauguccaucucacuuacagaaacugaaugaaagcaguagcucaucagaagguagcacuguggacaucggcgcaccuguagaagaacagcccguaguggaaccugaagaaacucuugaaccagaagcuuguuucacugaagguaaagaaaagaauccuaauguuaaucuuucauuuggagugcagcuuguuuagcuguuggucagcuaaaauaaaucacauauaauaaaauggcacuuuguaauagauauaauucaaucaccucuaauauguugacagacaaaaaaacuuaaagucuagugucaugcuuugauuauaucugcccaauauguggaagagauuaagaacauggaggaaaaauauuuuaguaccaucaaaacuucuaacuuauauuuuuaaaguaaguagugauuucacaauaaguuggcaucuuagacacuacugaaaaugauccuacacagaauuugccuuaaaaguaacuuucugacugcuaaaacuaaacggauugcuagugcuaaauuguguuucuuuaaugaaaacaucaguuuccaauaauuguuggaugaaauggggaauaaauacugcccuagaaacucuauaccuaaacagucacuaguugagccuggugcaguaugggcaauagauagaagagauauguuuuuccuacaacuaauauuuccuguggucugauaucccugggaauuugagguuuggaaauaugcauacuuucuauuugauguuauuuuuucauaggccuaguauaccuucagucuucuucuauucccuauacaaaucaugcauaucacuuaauguccuuuucaaaacugcccucaucugaccaugguggaacagcagcuuguuccucugaauggcuguaagaaguauuuccauuuaauuuacccgauaauauacauuauccuaugaaaacucuuucucuuuuugaacaguuacauguuacuuuucuaucuuuuuucucuucuuuuccuccauuccuucacuccuuaguuccuucuuuccuccuucccuucuuuucuuccuccuuuucuccauucauucccuuucuccuuuuucuucaaacauaucuuuuccuccuuuuuuuuuuuuuugccuuggagcagggauccuguauuuauaucuuuuucuuuuuuuuuuuuuugaaaaccagauuuuuuuugguaagguucuugggaguaagguacauguucggugccuuuuuguguguguaccuaagugccuuugugcuuacaaugguacucagaaguaccuguugauugcauuuagacuaagugaaagcaaugugugaggaaggcaaugaaaagucaaagccaaaucauacaaauuagcuuuuagugaacuaaauuaauuaugcaaauuacauaagcccuucuaggcacaucacaaaaaauccuaaaugguaacaaaugcagcauuguuggaagagaucuacauuuuuacucuauauccuuuauaaaagggaaguuuucugcuuaacauuauuaauguccaauuuaaaguucuuuucuggagugacuucaacagagugcaacaggaugauaugguacaaggaaaagcuaccucacauuuauuuguaauuuacaaaguuucucuuggacaauaacacugugaggcagacaaagcaaauacuguccgcuagggcaucauuuaaaguggcugaauguuuccacaacuucacacagcugaugaaugugcucuuacuacucuaggcuuagagagcuaugcuagcaagacagagaugagcauaguaauaaaaagacaagacaaggacauugcuaaaggauauuauggaagcagagacacuuuaucuacuuuuauuucaacacuuucugcaggcuguguacaaagauucaaguguugucaaaucaauguggaagaaggcagaggaaaacaaugguggaaccugagaaggacguguuuccgaauaguugaacauaacugguuugagaccuucauuguuuucaugauucuccuuaguaguggugcucuggugagugagauuaagaaaaggugauacagcacuaauuuuuagaacacucuaauacugaugacuuauuaauccuuuguuucauugucuuaguauccaaugcauuuuuaauuaucccaccuuguaucuucuauagauuuacucuauaacucuauauuucuggauuaacuuuuacuauguauguaaauauaauuuuaagaagcuaaucauuaauuuuugcuuacuauuaaauagcccagaaaguguagcccuucagcuuauucauuaacaccaaaggaugugaauauucaauuacucauuguuuaauuaaaaaaaguuauuggaagcccugggaugggaauauauauucucugaguucugacgaauuuuguuucuaaaugguauuuauuauuauuaucucuugauggacaguaguaaguccuuagggaccacuucucugucuuuuuccaauugugugcucacuauuuuugugcuacuuaagaaauaaugaaaguugguaacaauaaauauugggcagcaugcccaagagauucauuuaaggauggguuuaucuuuauaacaagguguucacuucaucagaaucaauuuauuuuuauaggaaaauuauuuauaaaacuauaaauaaaacauacagauagcauuuuagggaaacacuaacacaaaggaaauaccauagauagaaaaagagaaagaaagagagagaaacagaguuugccugauugaaaugcaaguguguuacaaguuuaacuuuuuauaauucuaacacagacauauauuuaccuguaauuuuucugaagaaagaaauauuuucuacacgcuacuuuagaagucuuucaccguugaaaggaaugcauacuuagaagugaaacaucgagagguucauaauagaagaauauauauuagaaucuaaaugaaaaguaauuucauuuaaucauugucacacuguaugucuguugagaaacauaaauuauuaaaaaaauaacaaacaacaacaaaaaagaagcagaugaacccaacuauuuagucaaauuggagacugcgaagaucaaucacaauuucugcuuuacaaaagcacaagcuuucauuauuucuucaaccuccuuucuauagcaaaaaaaaaaaaaaaaaaaaaaagccaauagaaggaagcaaaauaaaugaaacaaaaggaauacauaacuucaaguugggauggccacaucaggauacaacaucaagaacuauuuccugacuaagucaaauuaauucauuggaaucauacuuuucuuuuucuuccaccaauagucuuuccccugauuaaauaaguaaaagaccuuugcgaggaaaaaaaaaaaguaacaguaacuacuguuucucugcccuccuauuccaaugaaaugucauaugcauaugauuaauuuuuuaaauagcuuauggaguauaauuauuuuugaaagcuaauaauguguaacauuuucuuuauaggcauuugaagauauauauauugaucagcgaaagacgauuaagacgauguuggaauaugcugacaagguuuucacuuacauuuucauucuggaaaugcuucuaaaauggguggcauauggcuaucaaacauauuucaccaaugccugguguuggcuggacuucuuaauuguugauguagguaucguucauauuuuugucucuguucaagguagcuugucuuauuuauauucaaauucuacaauagugagucucagaccacuauguuauguugacagacuauaauaaccacuaaacgcauauaugcaaugagagugucauuucuggaagacaagggcuaauuuaauucugauuuaaaauaacauugggggauggaaucuaugguaguucucuaguuaucugagaaagcuaaagaaaaaacaacacaucagcaguuuguagggaaaguagugaaacagggaacuuaaaagguauguugcuuaaauccuuuauguugugagucagacagacucaaguuuguaucccaggaccaucacuuguugauuuugugccacugaguuaguuucuuggccccaaacucuugacccccaacuuguacaguauuaaaggcacucaauaaaaacagugaugcuguugggugcuacagucauuuaaaaaaauucuauuugaucuacucaaacuuuuuaaagaguagauuuaaauaguagauuauauggauuaugacuucauuauaggaaguaagguauguagaguguagggaaagagaagucuacuuuauucagcagugaaaguuuuccuagaauguaaacuagauuuacggcaagcccaaacagcccuuuauagaauuuguauccccaaugauuaauacugcauuuacugaaaacaagugacugacuucaagauguguuaaaguuaagcaucauguuuucuauuaucaacuuggcaaaauuucagcuuuagaaagcuacagcaaaacuauccugauuucauauugaguaguuuuaccccaaaaagauacuaacccagcaagacuaugaggguuucuuguggaaaguguuucuugagcuaagaaucaugaaugcauuauauuuccuugacccugaacaaaggcaaaacuaagcuauuuaaaaaacuuaacaauguuacugugaaaugagccaauugagagaaaucucaaaggaagaauugcuuuaucacaucaauaagggagaaaguuuguaauauugagguuucaagcauuagaaguuacauuauguuucaauuucagaauuguuuacacuauaauuuaaaucuaaauguaauuuaacccuuuaaaacuuccugagguuuuuuuucuauuauguuuauuacacaucagcuuuuucaugaaaguuuuuuagugucauuuuugaaacauuuuaagaaaauaauuuuauagaaaauuuuguaguuuguaacaauaauaucuuuauuuucaauguucuguuuuaauucuuuaaugaagaucaguauagcacucuauaaaaggacuaauuacagcacaucucaaauaauguaagaaguauauuaaauaugauacaauuaauacauuuuaaaaaagaaaaguuuacaaaaauagugugcaguauaugcggaauucuccaauacuagcaucuuucuaaccaaauaaguuauaaucuuccuugaauacaaaguuuuaguaaauuccuuauuuagagaauuagauacguaagauuuuuccuuuagucauguauauuaccuacaaaugaauacaaaugaaguaaauuuauugcuguguguauuugguaaauauucauugauuggcccuuuggggccagauaucauggcagaagccauaaauuaguauaaaaaauuuugaggaaguuuuguaauggaauuucuuucuaaguuacuuauguaaaaauaaacaagugaaaaugcaagguauuaccaagacaaaauaucaccuucaaaacugauguaguucauuaauuucugagaauaccaauuaugauuaguugaauauacugaugcacaguagaaacuuccugcuuuuuuuaguacaacagcaguuuuuguauuuuauaacuagcuacaagaaaagccuuaaauucaacagcaacuuaauaaaauaaaggaagaauagccaaugaauuuuuuuccaccuugauuucuucuuuuauuuuacuaauuuuuacuuugcuuuuuuuuucuauuuauucaguugauaaauuauaugacauuuaaggauuuuuuuucaacuagcuuuuaauuaauguccuaaaaauuacauccuuuacaucaaacugaaauuauuucuuuaauuuuuuaaagguuuacugaaaaugucugaacauuuauccucugaauaauuauaagcaaaaauuauacuuguuguauuauauagcaacuacacauugaaugaugauucuguuuauuaauuguuauuauuuuugugugugcagguuucauuggucaguuuaacagcaaaugccuuggguuacucagaacuuggagccaucaaaucucucaggacacuaagagcucugagaccucuaagagccuuaucucgauuugaagggaugaggguaagaaaaaugaaagaaccugaaguauuguauauagccaaaauuaaacuaaauuaaauuuagaaaaaggaaaaucuaugcaugcaaaaggaauggcaaauucuugcaaaauugcuacuuuauuguuuuaucuguugcauauuuacuucuaggugauaugcaagagaaauaggccucucuugaaaugauauaauaucauuuaucugcugugcuuauuuaaaugacuuuauuuccuaauccaucuugggaguuuccuuacaaaucuauauacaaaaaaaagcugaugcauuauuaaaguacuauguguaaugauauaaugguaaucuaaaguaaauucuauaucagguacuuauucuuugugaugauauacuguacuuaacgaguuuuccugaaaauaaugugaaucacacaugugccuaaguaugaguguuaagaaaaaaaugaaaggaguuguuaaaacuuuugucuguauaaugccaaaguuugcauuauuugaauauauucaagauuagaugguuagauauuaaguguugacugaauuuauaaaacuaguaauacuaacuuaaagauuacauacaaauccacaucauuuuuauaacaauaaaguaaaacacuuauaaugaacagaaaauauaauuuugacucauuacuauagguaauuuauacauuaaccuuaacuugcaucuuauuggucagagucacacaaaauguuauuuuauccuuuucaaagaugcaauaaucauuuuccaucaugcauaacagauuagaaauuuugccauuauugacuuauuuuccaugccuuuuuuuacggcaugaagcauuaguuuauagauauauaauauaaaaaauuaguucugcuuuuuuuuaaaaaaaaauauuaucaaaacaaaacacugaauugugugauuccaauagaaaaacacugcucuuucaccuccuaagguguaguuacuuuuauggaaacuaagcuguauuguagacuuccauuugcacuuuguagauuguuuauagccuuauguucucuucucaagucuuauuauaaaugucacuuuguaagaacguaggacuugucuucgauuucccuaacauauaugaaaacuuuguccucauuaucgacaacucagaacaauauaauacaaguaguccucuuuuauuucucacagagagccucaaauuuucaccaaaauguuaacagaaauuaucucugggguguauaagaauuaagucuguuuuccaauuaaaugucacuuuguuuuguuucagacuggcaguuucaguucuggagaaaaaaaaugucauuuguguacauucuacuugaaaacauguugccugaaucaaaauaauauauuuuauauggcuugugaaaucugaacaaugcuaaacauuugaaaauauuauaaaccuuuuacauuugaccauuugaaaguuuauuaaauucauuggucaagugcucagauauuuccauacauuacacuucauuucuauaaaaaagcugaucuuaucgguauacuuuuaauuuucucagaaauaaccauaucuauaauuauuaaucaauaaugccuuuuauauuaaaagagguuaguuuuugaaacuuggaguuuuagacauaaaauccuuauaaaugcugauagugauauaacuaauaguuuaaauggucagauuuaugaauauggcucuauuccucauaaugacaacauacacacagcacuaaaaugacuaaucucuucaauacguguuuggcauuguagagucaaaauaacguuauaauugauucuauuuuuuauacuucuaguguuuggauauuuuauuuuguaaaaauauaaucaugaaugauggugagguuggauauaagaaugaugauuaugauugggaagugagauuugaacaugcucagaaacucucauuuaauucuuugcccuagcagcauaaaaucacaauagcugcgucaaagcguaacucaggcacucauuuuauuuuuguuguucuguuauuuuuucaaagcaugugcuuuuaugcaacauuacugaauaaagcauguuguacagugcuugauaagaaguuagaaaguaacaaauaaauuaucaucacguugcacuuuguguuuugcauguuuuaugcacauuucuggcugacagcuuuuaaacauuuauuguauuucaaauuuccaguccaaauuuuucaacuuguaaaauuaaacugagugaauugaugucgugaauaucuaggguaaaauaaaauuuguguuuaaauuuguauuuuuaauuuccuaaccuaggaaaucuuaaauaccuucuuuuucaaaagaacucaagucuuaauggauagggaaacagacggagagcaucaugaacaaaaaguaacaccaaauguucugucauaucagauuucuaacuaauaacaaacuauauauuucuauuuuguauaggauaaucuugcuccaacuuggaugggguggagcgcugguuccuccccugagcccuuuauuauggguacuguauuaccccuuuugcuaccuuuaauccuugcacugugacuuauguguaguggggugagggagggauugggaaggguacuauuauugcaccacaguagggaaaauacauuauuuacauccuaauccccucuuuucaauugucuuaaauuucauuugaaaaaaaaaaaaaccuuuaugaauuuacccucuguggauuuuaaccccaaugguugauaucuuuauuaaguuucauugaauaugauuuaguuauguguauauggaguuauccaucuuuggggagauuacuggauuggugagggcgggggacccugguguagaaugauuaugugaaaaaacaauuuaacuuguuaagcucaugauacuguuugaggcauacagccccugcuguuuaguacauuggucuggguccugaaaauuaccaguuagauaccaucaguugauuauugauauguaugagcagauacuagggugcaauauuucagguuucauaagacugguauugauugugaccacucucauuuuuuauuguguaaguucauaugggguuauuuucaaaauguuaacaaggcaaaaauauauuaagaaauaguugaauaagcacaugugaauuguguuguaaacaaaaaguuagaauaaaaaaauccacuuauuugaauuaugcagaauagaauacauaccuagaaauaaaacaaaaacgucuuaucaugaguauuaagauaaaauuuaaggcauaaacucacuucuuagaauaaguaacucccaacuaacuuucuaggauuuuaaaacauaacacagugaaaacauacauaaacauaacucuacauuuuauuuauucuuaaaguuuaaguguauuauacaagaagaagaguuuauauucgagagacagaaaaagucagaauuuuuguuuggaucaccaauauaucauagcuuacaaaaaaacugucuuaauuaaaacccacaacauaauuuuuuuagauuuuuaagaaagauucuauuauucuucuuuauacuuaaaaauggaugauuccuacuuugcccacuuuuauuuuuauucacauagauuuucuuuauuucuauuagagaagcacuagaauucaugaauaguguugauuugaaguucaaaguaauuaauucagauaaaaagacauuucugcauguaugaaaauuucuaaugugaauuugcauauuuaauuaucaauccuucauuuaguguagacuuauuuuuaaaaaugcagguaaugaaccagaaauagaauugguugugcuagaguagagaaacuuuauuugaugauuguuuugaaaaaaaagcuucugagaagaaacaaccucuaguacaguauuaauucauuaagauagcuccuuucucagacauuuccuuucauguagccugaaaguucaauuugaaauuuguucuuuccaauuuauucagacuaauucugccuacuuucuuccccccauaagaaccaauuacugcagcuuuauugagacugaaaaaaguuaauacaccuccuucuuugcugaaccaaggaauggcuuggaacucuugggaaaagacaaucuuuucuaugaucuuucauugucuaauuuaauacaucauaaauaugacuauagcuuuguauaauaaacuccccaauacugugccagauguuuucuaagauaaaguuauuuuauguucacaaaaaaaauaaaacuuuucucugggccaaauguaugccaacuuugcaaaucauauccugaagugcacugcugcagaguacaugcuugcgucauaaauuccauagaguucgcuuuaacucuaaaucaauccccaguuucaaaguaaaccucucaaacauauuaccuaagcacaaacuucucccugugcucaguuccuuaauuauucucaucccauauucagaaauaacauuuaaaaauuaugcuuugaucaauaaauacuaaucuaaacuuugcuucauuaacccauucauuuuugucaaccauuauuuuauuccuauauucaaagcucucugguauguucuuauauucaagacacucaaggcccuggaagauucacgaacauauguuugcaucuuaaauuuuuagaaaaucuuacaaucugucaggauuacacugaacucuaguacagaguaauauggguaccagauaagugggagcaacucuuccacguagacuggaaacagcacuaaaugcuauuuauaggcuacuuucugaacuuaacuuguuuuaaccucauuuuucucauaugccaaaugagaacgcaauacugaauuaucuguacaguucuguucaguacuagaauucugauucuugaauucaaaggggaaaacauuccucuuuauuuuggaggcuaaacugggggacaaaguuaggcuccaugaaagaagugcuauuugaacuaaagccuuuaagaggggagaguauuucagaagaggagcuauuagacaaggaauuucaauguaaauggcaucucaaucaccuggcaauuauauuagcacacgguuauuauauuaauugaaguggcaugaaguauagaugaccagggaaguuaaaacuggaaauauagauuguggagugaugugaauaccaagguaagaaaaauauuuguuaguuaccagagagccaauaaauaacuuucaagugggacuuggggaagauuaauucaucuuacauagauuaaaugaaggagaagguuaggagacagaugacagugcaaguaugaaauaacagagggcaguucuagguggugacugugagaauggaaaagagguggcaaagcugagaaacguuucaaagaaaaaaugugagacagguaaugugaaaagaaaaucgagaaauagguauagauaaucaguguucugcucauacucuaaauuggguguugaaggcaaaauacguauuuuaauuaguacucuguguauacacacuagaaacagcauuguaaucuggauaguggacaaaauauucagaaaagaagggaaauaguaacuugauuucaauuuccaaaucucuaaucugaaagaaaucuaauucuauucauccauuuaaaauaaauuauauaacgagaauuuaugaaguccauuguauuaaugcagacagucagaugagauaaggcaaagugucacgugucagcuugguaguugcaucggccacaucauuugguucugccuggauaacucaaccaaauuaauuuuucauacucauccccuccaccuuugucauuacugguauucuuauuuucuuuggcccacuuaucacacuguuuuauguuccccagaaggccuagaguucuuuacaggcuuuaaacagggaucagaaguauaagaaauuggcucauguauuuuuuuuucagacaggcaguuaaaaaaaauuguucuaaaaauacacuggcaucaaauggcaaauagaagauguuuugacgacuacuuccauuggaucagacugacaagaauaauacaagcacauagguggaauuaaacuuagcuauuaauguccaaguuugaggcagcugccccuuauaagcauuuuagggucuguuuuuagcuucccucuuagccacuccugugcagcuccagugggagguauggaggaaaaagcaaggaagccaucccuauguuguuuccaaacaugaacacucaagauuuuuaacuagugguccagaaguaaagagggggaaaacauccuucuauagaaaaaaaaaaaaguagauaauaauugaacacagaacuucaugugaucacaucagauuugagaacuauguauggcaucccucuuuuucuuauuuuccuaagaaaugauuucuauuauguuucauuugaaauaaguuuuuugaauuaaacucaguaaaugaaacaacugacaugacuggagcuugaaauaaacgaugugaugaucuaaugaaauacauaaugcaaauugucuugcuucuuaugcaaaaauuauuagucauagcaaugcaugaauaauuaaagacaauuauauuagguauuuaauaauauuuuuuauauuuaucaucugaauuuuuaaguuauuuuaaaaauauauuggucaaaucaacucagguccaaauguuuuaguuuuguucuuuaauauauugccuuuuuaaaaugaguuaaacuucuguauaggcuuuuuaacuuuucuuuauucugauaacacaauucugacuucaucuggcagcaaguuccucugauuuuccuuuuccuuuaaccuuuuaaugcuucucccucccuuuuuuuuaaaaacauuuuuguuucauuucuugguuauauugccuauaguuguuuuccuaaguguauugcuuaagaaaaaaaaaugaauuuuaagauuuuuuugaaccuugcuuuuacauauccuagaauaaauagcauugauagaaaaaaagaauggaaagaccagagauuacuaggggaauuuuuuuucuuuauuaacagauaagaauucugacuuuucuuuuuuuccauuuguguauuaggugguugugaaugcccuuuuaggagcaauuccauccaucaugaaugugcuucugguuugucuuauauucuggcuaauuuucagcaucaugggcguaaauuuguuugcuggcaaauucuaccacuguauuaacaccacaacuggugacagguuugacaucgaagacgugaauaaucauacugauugccuaaaacuaauagaaagaaaugagacugcucgauggaaaaaugugaaaguaaacuuugauaauguaggauuuggguaucucucuuugcuucaaguuguaagugaacacuauuuucucugaauauuuuuauuguuuggaauaauaacaaaauaaugacauacaucuauuauuuaguuccuaagaaaaaguauauauuucuuucuauuuaaaaaauuucaauuuguuaguacaaguuuaugagcccagaugggugaaaacuuuauuacauguaaggacugcagauauagucaguagugaccagaccaaacaaagaccucuuugucuuuuuucuuguauuuucuuuguuucuauauugcucuuucuauauaaacaaguaaauuaauaaaucaguaacuuugccauuuuuuauugugauuagaaggcuuguuucccugaucagcuaccaaaacggaauacacuuaacagauagaucaucuuccaaaacacauacacuuaauacaccuaauuggauuguaauuaauugguagggauuaacugcugcugaguucuauuauuuggaucaaaguuuggggaaugacauuuagguuuuagaauuagaaccaggcauagcggugggugccacugcacuccagccugggcaacaaagagugaaacuccaucuaaaaaaaaaaaaaaaaaaaaaaaaaaagagagagaauuauaccuggaagcaacuagaaacaaaaaugaagcaaaagcagcuguugucuuaucucaaaugaccuuucagcaccauuauuuaagucuauuuuguccuaaauauuaauguuuucacuacugggucucuaagacugggucuccaagaaaaauaguuuauaauuuauauuuaaaaaagguagcccuuuaaacauuuucauuugauucugcuucuagcugcagcagcaccacaacaaagcagggaauaaaauaagaguccagauuauuugaaaacucagcuuaaaaaaaaaagacuguacaauuucuuucuucccuugugguucuacagugucuuuagggcagaaaucaauuuuugcucaccaagguuaugauuucaacuguucaaccagaagacuaacuaagcaaacaaaccaacacuggucaaaacccuuuugcagcucuuccagaggugucaacuaugauuacuuuacaaauucuucccaccuuuuuguuggaaauucuuauuucucuucuuaacauuuuugaucuacucugaauaauauucaugcaauuaaaauagagauuuuuuaaaucugguaagaacggguggggcaugguggcucaugccuguaauccuagcucuuugggaggccaaagcuggaggauugcuugaggccaggagaucuagaccaguggaggcaacauagugagaccuugucucuaaagacaaauaaaaacaaaaguuaaaaaaaaucuagcaagaaugcuuucuuuaaaaauugucgacacaugaugauauuuauuugggcacuuauucuaacccuuaacuaaugaccauacuuguaaauaucacuaaagcaaccaccuccuccauaaauuugaggaaagaaaaauuaaaaauuuuaagcaauccuuuaaaauguaagcaauucugaaaauacagugaugguccugcacaaagcuauuaaauaaauucugccaccaaaaaaaaaaaaaacccucuaaaauacugcuucacauuuggcuuuuauagaaucaccucucuauugauuaguaagucauugaaauggucccuugaaucacuuuuuuguuucuauaccaaguguguaauggaauuguucuaucauugaccuaagccacugacauauuuaacacaucucucucucuuucauauacaaaagccuuguacuuucuagcuaggaaucauuacuuucuuuucacugcugucacccacacccuugcuuagcuuuugucucaugaaauccaccaccucacaaggguuagcguuaucagaacaaagauauauugugauacagacgcuaaaggcuuugcuaaccucccucacuagcuaagggauaauccuuuuaggcccacaggacucaaaauucaugccccaggacaaguaacaaauuacuguaaguuguuagccugaguauccuucauccugugagugccaagugucugcuguacuauuguucacauuucuuauucauauuaacuuauuaucuucaagaauuucagaaagaaaauagaauaggggguuauuucuaaauguuuugaugcaaaauucuuaaaaggauuguauuucuaaauguuuugcuccaaaauucuuaaaaggauaguugcaacccugccuuuauguauccugguacuauccuuacauuguuacaauaaagagaaaucuuaaauuuucaaucacuuugaucacccugcagauaaauuuuagcagaugauccuuagaucuaaguuguaauuauuuggcugauagagcuauugacccauguguuggcauuuguaagacuuucuaaaaagugcuccagcaaauuuuaauacugcuuuaaauaucaugacaccaugaacucuaaagaauugaaaagugcuugugaguugguuaucaaggggaggauauaucaaauggccauuuuguucaauauguguucuagaaaugaaaagccauacuaaaauacugucuugguccaaaaucuguguaaaauuuguuuugaaaugucuuucaaaaauauucccuuuugaaaauuauaucaguaagaauauuuauuaaacaucaggucuaaauuauuuuuacuccaaaguaaaacaugcauguccuucuuaauaggccacauucaaaggauggauggauauaauguaugcagcaguugauuccagaaauguaaguauuccuuguauucuaagucuuuuuacaauauugaucaggugguaaaauuaaucgaauaaagcauaaacgaccaaaugaaaugauucuaucuugauuuaaaauauuugggaaaaagugugacagguaaauauucaagcauagcaauguuuaucagaaagaucuuacuaagauaauucaacacaugaauuauuuugaaaaccaaaguaacaaauucauguauuuaguaacuaacaaauauuuuccuuuuaaauauuuucuauuuuguuuccuauuuauccacacauuauauaauuaguaguaauuuuagugugcgggaccaaauuugaagaaauauaugauuucuaucauuaguugaaauguauagucacccuccauauuagacagcaugaaaaguuauggauauuguucugucagccuuagauuacugugaugauuucuuucaaauaauccuauuuuaaaccauauaaaagaauguuuuuauaugauuuuugcauucauaaauugacuggagccuuuacuaauguugcaaucacuucugugaccaacagauuccuuuaaguguauaucaccaaaauauaaaccuauuuuauuugauuucagccucuuucaggcuccaagaccuaaacugaaauucaugcucauuccaacuuugcucuucaaaacuuuguaagauguaguauuuucuaucaaccuucaucuuucuauucucaagucccaucuguuuaguuuaucaucauaaagaauaaccucugucccugcagucuucaaccugauagaguuugauguuaucuuucuugaagugcauuucaaauagcuuuaguuuuauguugaauaucauuuugauaaccuccagaguuguuuuauuucacuuugucacuuauauuuuguuuuguguguuuaguugguuuuuaacuuuguugcuuuuagaaggacaugaaucuguuaaaaaacuauagugaccuuucaguccauuacuaaauuauaaguaauagcccauuuguuuuaagcacaaucuaggaauuaaauaaucaacugaggauuuauaaaauggacuguccaucuaugucuacuuaaucugaaaaauucaauaacuguuacuuuaggguaaagugccaaacaucugaaugaacaacucauuucuuauuugcuacauuauuucaugcauacaugaaugacuguuucuaaaccuagccuguagauauuuacaguuuuaaauuuuuuauuaauaauuuuaaaauuacuaaaauucaguaccuuaaaagcuugcaaauuuagcacauuacuguucaaauggaagaauauuauuuguauuuauaguuauaaaaauagauuuuagaaugucauaauagccauauuuuucacaugaaaacaucccuaaaggccaauuucagggauguuuuuuagagguaguugauucagaaaaaaaaaaaaugcugacauauuaguaagaauaauuuuuucuauuguuaugaaaaagcaccagugacauuuccagcacuaaaauguaugguaauauuuuacaaaauauuccccuuugguagguggaacuccagccuaaguaugaagaaagucuguacauguaucuuuacuuuguuauuuucaucaucuuuggguccuucuucaccuugaaccuguuuauuggugucaucauagauaauuucaaccagcagaaaaagaagauaaguauuucuaauauuuucucucccacugagauagaaaauuauuccuuggaguguuuucucugccaaaugaguacuugaauuuagaaacaaaaugggaguauauauuauaacugauuuuuccuuccucuuccucugucauucacuauccauauauuuccggcuauagaaagcuaagaauaacuguguuccacacucuuguucauagguucauaaaguuuuuccuccucuuauucauuaucaagaaacauuuucuaucuuuuaaaaaauaauaauuagaauaaaacuagaaagcaaccgaauaugccucuuucccaaaagcaauuuguuacuuuaucccuacaacuacccacucccccuugaaaauauauuuuccaacuaauucuuugcaauaaauuaggcacuggauguaagcuucuucuaguguuuauuuuuacgcuuuuuucugucauugauuucuuuuauauauucccauuucuuucuccaagauauuuaaauacaagcuauccguuucagucuugaauuguaugacuauuauuuaucauuuauaaggcucauuugauugucccaauuaccuauguacauuauagaacauauggaaaguaaauaaauaucaucacuuggaaguaacugcugccauucacauuuuguuuucuguucagaguauuucugcacauacucuuauuguuguacuuuuuaucuauaauuauaaauuccacuuuagacuuaacauaaguauuuucucauuuuguuaagucuucauauaugcauuaucauaauuuacuuauucauuccccaguagguugauaauuuagauuguuuuuaaucuuuaaugauuuaaauaguaccuuguugaaaguuuuguacaaaaaaaaagagagagggacagaaaauaaggcuuuaauuauuuccugagaauaaauucccacaaugaaguauuuuacuccccuagaguaauauaacuacucaaacucccaauaucaguguaugaacacccaugccaccguucccucacugucaccaaacauucuguuuuugaauauuugauauuuaauaggugaaaacuguauuuaauuuuaauuuuuaugacuuuuauaaccuuaauuguuaugacuuuuauguauuuuauuacauuugaacauguucuuaaaugcucauuggccauuuguauuucuuccuuuauguacuguugcuucaucucacuuguucaguagguuugcuuuuuguauaaugaaugagugcuuucuuagacuacagaacauucuccccucaauucccuuuucuuauuaccaguaguauucuuaagucaauaucaggcuacucuauuucacuuacuugccaguguuccaaucuucuaucccuacuggucugucccauacuuacuaugcuaugagcucugauuuauccccuaaaucucucacuaacucauccaguuuucuuuuuaucccuuuccuccaauucuugacagaguuagagugacuuuuuuaaugaguaacuccaaacugucuugcaguauacauccucuaacucuuugcuacauuuaaauaagaaaauuauugccuuuaacaucauaaagguaguauguauaguauaagguaccaaguauuuauuaucucagugaaccaaauuucgccacucacuaagcauaaggucuuggguaaaauacuuaaccuuuuugagauuuggggguguuugucuucauaagauaauaauaauaaagucaauuuugaauuauuuagggaauuaaauauuaucauaccuaaagaguacaauuuuuuuuacauuuuaaaucccagauauaauuauacuaaucaguugaauuuuguauuucuuuuuuuagccauccauuuucuauuuuaacauugaaaaaaauguacaaaaggacacaguuuuaaccaguuugauuuuucuuuucuauacuuuggaggucaagacaucuuuaugacagaagaacagaagaaauacuauaaugcaaugaaaaaauuaggaucgaaaaaaccgcaaaagccuauaccucgaccaggaguaagaaguaucaaaugauaugggggaaaaauacaaaaacaaaaacuugcaugcuugucucacaaaaaagaaaguagcuaacauuuccaguagaaaaaauuucuuucacuuguagagcaucaucuaaaagugauguuuguaucuuuuaugauaaugguaacaacaaaaaaaauuaaagaccaaaaaagaacaagaagaaauagaagauacacccuugacuucaagagauuuagaagcaccccauuacaauccauauuaauuggccaauggacacauagacaaugugaugugcacaagagaaaguuaaucacacaacucaagaaugguugccaaguaauaucagggaaagaaguaaaccuugggauggggcuguaagaaaugcaauuuccuaauauuuuaagaaaugaaguguugagugaaauaacaccuuacuucuauuuuauuuuucacuagagauacuaaguguuuuaaaggaggaaagaauuccaguaucuacuauucauauguauggcuauagaguuagguauuacuaaugucugcagaagucagggucaguaauuacaguuuaugaugauaaauaacaauacucaugcuuccaugaugaaauaaacaaauugcuaugaaaauguacagcuauuaucccacacuauaaauauuuuuaugaugaugaucugagagguuucaguaauuccuagggugcaucaaggaaaaaacuacuagcaaauauucauauugugaugauugaauauugccuuccugagaaugaugagaaauauauacuuucuccauuaaaauuuagcacuaagaguagaaaugaaacaacaauuuaggaaaaauauaaguuggaaaauucccucagaauuccucaguggcccaaagaaauaagccugcagauggccuucagugacuagcaguggcagaaaugggaagcagaaucacagaucaacgacaaagaacgugaaguuuuuuuugacauaaacauauaggaaaugucauucuggucucauuauccuugugcaguuucaggauucugugucugacaauguuagccaaggcuauuugguagaagaauaugaguauugccauaugugguauuuaaaugcauaauguuauagaugugucuuggaaauuccaaauucuccuuaacaauuauuugagaauacaacaagugaaauauuaauaguacuauauuuuaaaauggauguaugguccagcugaucauuggaaagucuugaaaaaaaaauuaaauggguuucuuaccuuuucauaaucuuaaaauguugauauguguugcauaccucuggaagaaguauacaguguugaauguuucuuuuguuuguuuguuuguuuguuuguuuguuuuuaucagaaaccuucuuuggauaagggauuguuauucugagaaauacacauuaguaaauggcaauuuaaauaacuaaauuuuaacaauuaauaugcuauaaaucauucuuacaaaaaucagggccaaugacuacuuugcaagaaacuagaaagucaauuaaugcagaaaguacuuaaugcuaaugcacaugagaaaacuccuuuguuguuaaaagcauuucuauuucucuacagaacaaauuucaaggaauggucuuugacuucguaaccagacaaguuuuugacauaagcaucaugauucucaucugucuuaacauggucacaaugaugguggaaacagaugaccagagugaauaugugacuaccauuuugucacgcaucaaucugguguucauugugcuauuuacuggagaguguguacugaaacucaucucucuacgccauuauuauuuuaccauuggauggaauauuuuugauuuugugguugucauucucuccauuguagguaagaaauauuuaaaguucuuaaauucaguuaaauaaaagugaaagcugaaacaaucaagauuagauucaagaucaucccagcaaucagagauaaucacuguaaauauuuugauacauuuuauccaaguguguuuguuuuuuuaacaaaaugucuccuacuauaugucaguauuguuucuuauucuauccauuuagaacaauauacuuaguguaaauguaguaaaaccucauucauuugaacuagaacugugcuauuaacuaaaauaaaaauguuuuugacauguugagauugaagaaccaauauaguaucuagaugguucuguuaacaagacuagaaauguagucugguacucacgaaaauugcuuuagagaauagacauggagucaccagcauauagauauuaguggaaagugguuucaagauaaggaaaaguauugcauaaaaagagaauaaagacaaggacuaaacauuagcaaaugcauauaguagguucucugcaagugucauguagagauuuucuagacuaccuuaaaaauggguuuaucauaaugaugcacaagggaaauaagguggcaugggacaucaucaguacuauacuucaaagccuggaacacauaacuagccucaugagcaauagcucauuucauuagacaaaacuaaagcucuaguaaaguaaaaagcaucugucugugggccuauucauucuucccuaaacaggaugauaugauugggucaauauuuuacuauccaaaacgaggcaccuguguuggacagauuuucaugccacuccccucucugaagaaacuggccuuauauccagcucauuguauauagccuuugauucccacuaauuauaauccuugguuauaacuaguguggcuaagguauaaaaguuguauucucacacgucuccuucucucucucucucucucacacacacacacacacacacacacacacacucuuacacuucgucuuuucagaaugaggcauuuaaacuugaaggcauuuaguuucuugagcucuucuuuuuaacuuuacaaguauuguuuuuaucuaaaaagcaaauggagagagaagcugaaaauaagaagacugagauuacaguguuagguacaggagaccaaaaagaauugaaauacaacauuaaguacaggauacuaaaaagagcaucaaccugggauccuuucagaaaugcaccagaacauacauaaaugaguauauaaaaauauuagaguggaauuuaaguaaguaccaagaucauggggagaugaaaguagcaucaaaagcuaccaauacuuucagauggaaaaggaguaaauagagaauuuagaauauggcaauuucagaaaaagucacuguauacauauaaacuuguaccuauacuguugggcugcuacuguucggccaaaugugcauuuuuaacuuauuuucuuuuuaaauucugacuugggacuuuacauaaacuaaaaguaguuuauaaacaucucuuaaagauaaaaaaaaguacuauaauccuuauaauugaaauuauugcugaauuucaaaauuaagauuuauaauauauuauguacaauuauauauauauuauauauaguugucauauuuaauauaacuggguucaggacucugaaccuuaccuuggagcuuuagaagaaacauauguuuauuuuaacgcaugauuucuucacugguugguauucucauuguuuauucauagguauguuucuugccgagcugauagaaaaguauuucguguccccuacccuguuccgagugauccgucuugcuaggauuggccgaauccuacgucugaucaaaggagcaaaggggauccgcacgcugcucuuugcuuugaugaugucccuuccugcguuguuuaacaucggccuccuacucuuccuagucauguucaucuacgccaucuuugggauguccaacuuugccuauguuaagagggaaguugggaucgaugacauguucaacuuugagaccuuuggcaacagcaugaucugccuauuccaaauuacaaccucugcuggcugggauggauugcuagcacccauucucaacaguaagccacccgacugugacccuaauaaaguuaacccuggaagcucaguuaagggagacugugggaacccaucuguuggaauuuucuuuuuugucaguuacaucaucauauccuuccugguuguggugaacauguacaucgcggucauccuggagaacuucaguguugcuacugaagaaagugcagagccucugagugaggaugacuuugagauguucuaugagguuugggagaaguuugaucccgaugcaacucaguucauggaauuugaaaaauuaucucaguuugcagcugcgcuugaaccgccucucaaucugccacaaccaaacaaacuccagcucauugccauggauuugcccauggugaguggugaccggauccacugucuugauaucuuauuugcuuuuacaaagcggguucuaggagagaguggagagauggaugcucuacgaauacagauggaagagcgauucauggcuuccaauccuuccaaggucuccuaucagccaaucacuacuacuuuaaaacgaaaacaagaggaaguaucugcugucauuauucagcgugcuuacagacgccaccuuuuaaagcgaacuguaaaacaagcuuccuuuacguacaauaaaaacaaaaucaaagguggggcuaaucuucuuauaaaagaagacaugauaauugacagaauaaaugaaaacucuauuacagaaaaaacugaucugaccauguccacugcagcuuguccaccuuccuaugaccgggugacaaagccaauuguggaaaaacaugagcaagaaggcaaagaugaaaaagccaaagggaaauaaaugaaaauaaauaaaaauaauugggugacaaauuguuuacagccugugaaggugauguauuuuuaucaacaggacuccuuuaggaggucaaugccaaacugacuguuuuuacacaaaucuccuuaaggucagugccuacaauaagacagugaccccuugucagcaaacugugacucuguguaaaggggagaugaccuugacaggagguuacuguucucacuaccagcugacacugcugaagauaagaugcacaauggcuagucagacuguagggaccaguuucaaggggugcaaaccugugauuuugggguuguuuaacaugaaacacuuuaguguaguaauuguauccacuguuugcauuucaacugccacauuugucacauuuuuauggaaucuguuaguggauucaucuuuuuguuaauccauguguuuauuauaugugacuauuuuuguaaacgaaguuucuguugagaaauaggcuaaggaccucuauaacagguaugccaccugggggguauggcaaccacauggcccucccagcuacacaaagucgugguuugcaugagggcaugcugcacuuagagaucaugcaugagaaaaagucacaagaaaaacaaauucuuaaauuucaccauauuucugggagggguaauugggugauaaguggaggugcuuuguugaucuuguuuugcgaaauccagccccuagaccaaguagauuauuuguggguaggccaguaaaucuuagcaggugcaaacuucauucaaauguuuggagucauaaauguuauguuucuuuuuguuguauuaaaaaaaaaaccugaauagugaauauugccccucacccuccaccgccagaagacugaauugaccaaaauuacucuuuauaaauuucugcuuuuuccugcacuuuguuuagccaucuucggcucucagcaagguugacacuguauauguuaaugaaaugcuauuuauuauguaaauagucauuuuacccuguggugcacguuugagcaaacaaauaaugaccuaagcacaguauuuauugcaucaaauauguaccacaagaaauguagagugcaagcuuuacacagguaauaaaauguauucuguaccauuuauagauaguuuggaugcuaucaaugcauguuuauauuaccaugcugcuguaucugguuucucucacugcucagaaucucauuuaugagaaaccauaugucagugguaaagucaaggaaauuguucaacagaucucauuuauuuaagucauuaagcaauaguuugcagcacuuuaacagcuuuuugguuauuuuuacauuuuaaguggauaacauaugguauauagccagacuguacagacauguuuaaaaaaacacacugcuuaaccuauuaaauauguguuuagaauuuuauaagcaaauauaaauacuguaaaaagucacuuuauuuuauuuuucagcauuauguacauaaauaugaagaggaaauuaucuucagguugauaucacaaucacuuuucuuacuuucuguccauaguacuuuuucaugaaagaaauuugcuaaauaagacaugaaaacaagacuggguaguuguagauuucugcuuuuuaaauuacauuugcuaauuuuagauuauuucacaauuuuaaggagcaaaauagguucacgauucauauccaaauuaugcuuugcaauuggaaaaggguuuaaaauuuuauuuauauuucugguaguaccugcacuaacugaauugaagguagugcuuauguuauuuuuguucuuuuuuucugacuucgguuuauguuuucauuucuuuggaguaaugcugcucuagauuguucuaaauagaaugugggcuucauaauuuuuuuuuccacaaaaacagaguagucaacuuauauagucaauuacaucaggacauuuuguguuucuuacagaagcaaaccauaggcuccucuuuuccuuaaaacuacuuagauaaacuguauucgugaacugcaugcuggaaaaugcuacuauuaugcuaaauaaugcuaaccaacauuuaaaaugugcaaaacuaauaaagauuacauuuuuuauuuua

SEQ ID NO: 5 - RNA, 159973 nt, Homo sapiens
gaaacucauggaacuguuccuccagauuaacacuucagggguuauggaagcuggaggaagcugagcuuuuacuacaucuuuuggggguaaauauuuuugcauguuucagcaguuuauguacuacagucuuggcagaugccugucagucaugcugagaggugcagggagaaauuacugagauuacaguucugucagcaugcuugaauaagcauaguaagucuuccaguaauccuggcuuugagacacuuaaggaguaaauaaaucauaaauucaaauuugcuuaucggacaucaucuguaaccaucaaggaaugaauguugauuugauauuuaaacucugaauacaauuuauuugauuggagguguuguaggagagcauuauuagagguggcuauuagcucaaagagauuuacugcaguucuuggcuguuacguugcccuugucucuggcugcaaauuugcuucccuuguaagugaguuauauauaugccuguauuugucuucuguugugauuguuugugaucguauaagaauaaacuggcaguuaggugacuucaacaaauaaugaauccugccuacuuaguuucaaggugaauacugcagcaaaagcgccauucgacacuagcacugaaggaggguggauuaacugcauuggcucaaacugugcuguguuuaggagacuugaagggaugauuccagguuugauaugaacaguuguucacucuauggguaaaaguagaaacaauauagcgcugauucuguuuuagacucucacacuguguccugccucagcaauuaguuaaaauagcaggcucuuuauugaaugcugcagaaaagccuagagagguagcaggguaagauugccgcagcagagugauauauuggccaggaauuuuaauaagauuuaaccagauaugauaauacaacagauggcaucuaaucuaaaaaauagauggauauuuaaaaaguugaagacaaauguagcacauuugagaggguuuaucuuccuguguguccuuggcaagugaaguucaguaccuuggacaggaugacaugaguuaggaaaguaaagucugcauaaacugucuacgugaucucaaagagcaaaauggaaaguuaacuaucaaucauuuguuuuggugucucucagugaugacuggcauuaggcagguuacuuagcacauacuuucuagguaaacagguaguuuuaaaguaucuaaaauuucuugcauuuuaaaaauuaaauuaaaggaaugaaaaugagugaucguaaaauaaauuccccugaagguacuuuucauucuauuaaccauauuaacagcagcacauugauuauuuaugaugaaaauauaccacuuacaauuguaugcuguauuuaguugauuaaacauguacaugauuucccaaauaauuuaaagagacaauuauggucccucggggccugauuuuauauuacugaagucaauaggcauuuucccuagacauagcuugagauaagagccccaucagaccagguuuuacucaguuuggcauucagacuauuccucauaaguuaaaaaaugauggauacauacuuaauuguacuuauaaucuuugaguuuauauaucuuucagauaacaaugucaguguucaaauugucuauaauugauuugcauuuaauauuguuucuuuuggcuauugcuaaaagggauucuucuuuguuguaauaagcuuaaaauauauuaauuuuuucauuuuaaaauggggaauuugaauuaaaugagguuuaaauuaguuuugauucuaccauauauaucuuuguauuccucuaaaugggaauuaacauuauuaacuaaucuauguuaaagugagauuacauuuuuuggugagauuauauuguuugaauauuuacaauauuaagccaaaauuuacuaaguaccuacuaaauucuaggacagugguuuucaaaguggggucuccuaaccagcaacaucaguacuaccugggaacuugcuaggaaugcauguuuucgggccucaugacagacuuacugagucagaagcucuagggauggguccuggcaaucuguguuuguguaagccuuuccuccaggugacugugaggcaugcugaagucugagaaccacugugcugggaaguaauuugguuaaauauuauaaaaaugguuuuuacuguauauaguuaaauacauauugucauuaaauuuucuauguucaucuuugccuagauauccuacuguaagcaguacuauguuuuaaagauuuaugcaauuauugaguauaccuuaagucuaaauauguccauaagaaggucuauuuuccaacaguuccauuuuagaacuuuagcucuuagaaguuaaauacuguaaugggaaaaauacuagaggacuuaucuguuuguucacugugugauuuggcacauaucacugacccucuuugauguucagcuucucauuuauuaagaugagagguuggcuuacaucaggguuucucaacucaguacuauugacauuugggucagauauucuucgcuguggggucugucccagacauuguggaauuuugagcaggguccuugccucuacccacaaaguguccauagaaacccucaguugugaugaccaaagauauuuccagacauugauaccugucuaccaaaggcaaaacugaccuccuccucauuugagaaccacugaccuagauuagcuccgcuaugaaaaguuccaucauaauaaauaauacaacaaauauaucauuuauccuuuuggaaguagguagguuaaaacuuauaaauaaaugaagacauguuuuacuuguauaacucagguauaaggugggaccuguuugcacccuugaagaucuaggugacgaucuauugguagauaucuguuggcagauaucuugcucagguaucuaccaauaccacagucaguggaaguccaaaaccuucugcaacuuaucagggacuuagucuuacaucauccucuguguccuggcaucgugguuucauguauacuacaccuaaccacucugucaagugacccagugucugucugucccuaguuuuuaacagagacuuaccuacaccaaucaccuuuucaauuuaauaaauuuuauuaaagaugugggcuucuacccgcauuuucucccuuccccaucccaucucugcuccucauccccucccugagagaucugaacacuccaaauuuuucucuucuuaguauggaaaguaguccaucucuccacagcucuuauauccagacguagaugcccaaacucaucaaagaguuuagaagauaaagggccuucaauuuagaaccauucaccauacauagaaggcaguuggggucauaugguauaaucauaaaguuauaaaaucauaggcuguuggaaggaauauugaauuuaaguucauuuucaugucuuuagccuuaaaauuacaaauguuacaagcuagagucucagaauuuuaaauuauaccuucccaugaauuuuuaccuaaaccacuuggcaauuuaguacagacauuuucucgaccugauaugugcgauagaaguagacaagccucacacacaugcaugugcgccuacacacacacacacacacaaauuuuucuccaacaguuaaagauucuuuucaauauacuauucuacaauucaaauuaggugcuauucugagauauauguggauuaaggaaccuaauauaagauauagguagcuauauuucuguuaaaauaauaauaccucauacuugaaugacuauauauguauuuucaaguaauuuuaaaaacaugaucccugccgggagugguggcucaugccuguaaucccagcacuuggggaggccgaagcgggcagaucacgaggucaggagaucgagaccagguggcuaacacagugaaauccugagaucgcaccacugcacuccagccuggacgacagagcgagacucugucccccacaaaaaaaaaaaaaaaaaaaaaaaaaaaaaaauuacuuaggccaggugcaguggcucacgccuguaaucccaacacuuugggagaccaaggcuggcagaucaugaggucaggaguuugagaccagccugaccaacauggugaaaccccaucucuacuaaaaaauacaaaaauuagcuaggcaugguggugcgcuacucagaaggcagaggcaggagaaucgcuugaacccgggaggcggagguugcagcgagccgagaucacgccacugcacucuagccugggcgacagagugagacucugucucaaaaaaaaaaaaaaaaccaugauccuuucugagacccauagcaacucuaaaagauaggccccauuaucucugucauuuugcagugagaaaauaaaggcucaaggucuccaaaugccaaauucacuucucguuccacuauccuacaaagcaaaacucaauaguucauguaguuugaacacauugguaaguauaauuucuaagugauuuuuuauaaagaccugucucaagagucuuccugcucuaagaccuucagagagauuaccagugcuuuguuuuauuccuaggauuaaugcauuuuaccugacuuaucauacauuuauucguaucauaugcuuaauuaauuuuccgguauauguauuauagaaugauuuuaauacaucauuuauuauacuagucauagucacauguguucuaucacuuagugcccucaaaaaacuccaugggaauaggauuauuacccccuuaagagggaauaauucaaacaugagauugaauuaaauuucccuauacuugagcuuuaccagagguaccacacugaugacccagccaacuucucuguuuucaccaacgaaaaugcagaacauagcaacagaccaucucuuuucacuggcacccuccagugcuugacauauagagagugucaguaacuuuuauugaagaaauacugaaauauuguuauugcuauguaguuccuuuacauuuuggacuuuaccuaacauuaaccacccuaguuaauuaaguagcaacuugcaaaugaggccuggaagaaccaaaaaacaaauuuuaaaaagaacugucugcaacucggaacugcuaaugcuacuuucuuuguuucacuuuauuucacuugagaaaaucucuuuggguuugauacggagauguucucagacuuugaaugugaaaaauuguucccaagaucaaauauaaauuccuccuuuaaaauacaaugucacaaaccuggaucacaaagucacuucccucuuuagucuuaaagugaauacucaagaugaacgugaaugaucuuuuauuccaauuuccaauuuagaauauuauuucagaaaauaauuauucaaaguuuuuugagaaaccuccacauaaagccaaacaaauuuuuaccaaaguaagguaaauucuuugucaacugagagccugaauuagaugauuccucagacuuuuuucuaauuauaauauucuagguaaaggaguuuagcucggcaauaugaccauccaaauaucaaccaaauccaagaugauuagauuuaauagcgccauuuuggagaugcauugauuauugaagauaaguaaaggucucaacauuuuuguuuuccucauuuaccccaaaauacauccuuagucacacaugucuuaggaucuggaauuuguuugauaaaaaugcugaguucuggccaggcgcaguggcucaugccuguaaucccagcacuuugggaggcugaggugggcagaucaugaggucaggagaucgagaccauccuggcuaacacagugaaaccccgucucuauuaaaaauacaaaaaauuagccgggcgugguggcaggcgccuguagucccagcuacucgggaggcugaggcaggagaauggcuugaacccgggaggcggagcuugcagugagccgagauccugccaccgcacuccagccugggcgacagagcgaaacuccaucucaaaaaaaaaaaaaaaaaugcugaguucugaaaaaauaaaucuuucuuguuuuguuucaaaugaaauuauagcucucugauaaaguggcauuccuuuuucuguuuuauauucaacgaguguauuaguccguuuuugugcugguaauaaagacauacccaagauuggguaauuuauaaaggaaagagguuuaauggacucacaguuccacaugacugggaaggccucauaaucauggcagaagacaaaggaaaagaaaagacacgccuuacauggcugcaggcaagagagcuugugcaggagaacucccauuuauaaaaccaacagaucucaugaggcuuauucacuuacuagaacaguaugggggaaacugcccccgugauucaaguaucuccaccuggccucacccuugacacauggggauuauuauaauucaaggugagauuuggguggggacacggccaaaccauaucagcaagugaaacagugaaauuggauuucuaaaaguugucaguguucuguuggaauuauuuuauucagagagguaaggaaaguacaacaggugucaaccuuccauaugaaauuuccuaaagaauauuauuguuaccucaugcugggagaagggaaaguagcagugauagaguguuuugauuucaaauguacagcuucuaguaaaagcauuauaauuaacuuuauaguaguaagcacaaccaggaauauaaaaauauaaaaguuuuggguuuggccuccagauuuaccaaauguugcuuccuaacaauuagccaacccucccacacugacacuuacuuugucuaaauugaguuuuaggagaaaacaacccaauuauaaagacacaacuauuaucagucaaugcccugacaagaaacagauggcuccuccaaacuuguggaaauaaaaagcaaacuauuugguuuuaucuucucaacacgauauuuucauggauuccuugggaaugcgguuccaguuuucccucuuuagcaggugugccaggcccuucugaucuggcugucugccuaccucuccagacucuagccacuuccacagacccaacuuuacauauauccuacauguaucuccucuucuuagaaugcaccuccucuuucuccuccacccucuuugugucuacucauaaaugccucagagaaauuccuagauaaguuuaagacagucuagauucuacuucccagucaacaaagaaaaaaguuugauaauuucuggugauggaaacaguuucuuaugcuguucuggaauauaaaauggugccacaccuuuggagggaaaucuauugauaccuacuggguuaaaaggcacauacccuuccaccugacagauccauuuccugagacuagaucuuaaaggaaaauuugcacaagugggaaaugcaauuguaaagaaauguauacauccgcauuguuugaaauagaaaaaaaaaaaagaaaaggaagaaagaaagaaaauaacauaaguguuuaucaucugagaacugauuaaauaaacuuugguauauccaucuauauacagaacaaaauauuuuaagcaauaauaagugaacuaauuagagauaaauuauguaacuuaaacuagguuuacagccauauauauugugugauguuuuucuuucuuuuuaaaaaaauauuuguggagauggguucucaguauguugcccaggcuggucuugaacuccuggccccaagcaauccucccaccucagccucccaaauuguugggauuacaagugugaaacaccaugccuggugucugguacaauguuauuuauaaaaaaaagaaaaauauaaaacacguauauuucagaugcuuggauauacacaagaauucuaaagaagauaaaaaaaaaaaaauuaacagcgauugccacugcagacugggccugagggaagagaaacuggaaaguuaauuuuuacuucaagagccacucaagucaauugacauuagaaaugugacuuagaagaguagauuggguuugcuugguguaucuaaauaguauguacaagcagggcugcaaaggggaaugggaacacccggggaguggugagcagggcagaauggcugauuuacauguucaaggugcagaaggaagugaguaggcuuuaagagcugaggccagaugugacagccagggcuucucaaacaccaaugugcacagaaucaccuggggaaaucuuguuaaaaugcacuuucuuauuuagaaggucuggguggagccaaagaguccacauuuucaacaagcucccaagaaguggggaugcugccaguauguggccacacuuucagaagcaagguuuuaaaauucugaaaguauccugguuuugcgcgguccgugucuucacaaacaucaagcagagccgaaaagcacuuguuuuuagaaaaugagcugagaaaaaaacaccuaauuaaauacgauguuugcaacaugaagcuuccaccaaaggaagcuuacuguuaaguguucacgaucagcaguucugcuuugcuagcuuuuucauuucuaacaaauuuagacuucuggagauugaagcuuugccagauugaggcaugcuucuccccucacuacucauguguuuaguguauuuguuaacuuggugagaguacguccaaacauaguuauauucuuucacuugcuauggaagauugaagaaucugagacaaguaagaaggaagaucuccauuugccucccucccacccugccacaugcugcccccuaacauguuugacaagaauccaggcuacagacugaucauacaccuaaaaacuaucuucggucagcuacuuguagaaaugucucucccccauuauguccuuauaugagcuuaaugugauguaauccuuagcaguaaagaaagacuauugucuucuguuuguuugccugugaacucgaauugcagagacuuuccaccauaauuuuaauaaugugauauuguggagaguuuuaguauggccuuaugguaagauuagguacuuuggagauacacugcugguuucagaaucacacuuagucaccucguuacugugugaucuuggccaagaugcucaacuacucugagccucaguugccucauuuauaaauucaugaagauaacaugguaauagcaacuauuuuaugagacuguugugagguuugaaggucccaaaauauauuaaguccucaauaaaauuaacaacaauuauuauuauucuaaaauuauucuuagaauuuaucuaaaaauaguacugcuugaauauccauauguuuauuccugagucucuaccugcuaugauuuggcugugccccacucaaaucucaucuugaauuguagcucccauaauucccauguguugugggagggaccuggugagagauaacugaaucgugggagcaguuuuccccauacuguucuuguggugguguauaagucucacgagaugguuuuauaagggguuuccccuuucacuuggcucucauucucucuugccugcugccauguaagaugugccuuucaucuucugccaugauuacccagucucagguaugucuuuaucagcagcaugaaaaugaacuaauacacugggcaauuuacaaaagaaaaacaaguuucuugaacucauaguuccacguggcuggggaggccucacaaucaugcuggaggcaaggaguagcaagucacaucucacauggauggcagcaggcaaaaagagaguuuuugcaggcaaacucccauuuuuaaagccaucagaucuugugagacuuauucacuaucaugagaacagcacaggaaaaacccacccacaugauucaauuaccucccacuggguuccucccaugacacaugggaauggugggaguuacaauucaagaugagauuucaguggggacacagccaaaccauaucauuccacuccuggccccucccaaaucucauguccucacauuucaaaaccaaucuugccuucccaacaguccuccaaagucuuaacucauuucagcauuaacugaaaaguccacaauccaaagucucaaggcaagucccuucugccuaugaggcuauaaaaucaauagcaaguuaguuaccuccuagauacaaugggaguacaggcauugggcaaauacagccauucaaaaugggagaaauuggccaaaacagaggaacuacagacccugugcaagucugaaauccagcagggcagucaaaucuuuaagcuccaaaaugaucuuugauuccaugucucacauccaagucacguugaugcaagagguggguucccauggucuugggaagcuccacaccuguugcuuugcaggguacagacucccuccuaguugcuuucacaggcuggcauuaaguguggcuuuuccaggaacacagugcaagcugucaguggaucuaccauucuggggucuggaggauggugacccucuucucauagcuccaccaagugguacacuaguagggaaucugugugggggcucugaccccacauuucccuuccauacugccuuaacagagguucuccaugagggccccaccccugcagcaaacuuuugcugggcauccaggcguuuccauacaucuucugaaaucuaggcagagguucucaaaccccaguuuuugacuucugugcacuugccggcucaacaccacgugggagcugccaaggcuugaggcuugcacccucugaagcuaugacccaugcacuauguuggccccuuucagccauagcuggaauggcugaggcaaagggcacaaagucccuaggcugcauacagcaugggaacucugggccuggcccaugaaaccacauuuucauccuaggccuccaggcuugugaugggaggagcugcuaugaaggccucugaaugcccuggagacauuuucuucauugucuuggggauuaacauucagauccucauugcuuaugcaaauuucugcagcuagcuugacuuucuccucagaaaaugggauuuucuuuucuauugcauugucaggcugcaaauuuuccaaacuuuuaugcucuguuucccuuuuaaaauugaaugccuuuaauagcacccaagucaccccuugaaugcuuugccacuuagaaauuucuuccaccacauacccuaaaucaucucucccaaguucaaaguuccacaaaugucuagggcagggacaaaaugccaccagucucuuugcuaaaauauaacaagagucaccuuugcuccaguucccaacaaguuauucaucuccaucugagaucaccucagccuggauuucguuguucauaucauuaucagcauuuuggucaaagccauucaacaagucucuagggaguuccaaacuuucccacauuuuccuuucuucuucugagcccuccaaauuguuccaaccucugccuguuacccaguuccaaaguggcuuccacauuuuugggaaucuuuuuagcagugccccacucccaguaccaauuuacugaguaguccauuuucaagcugcugauaaugacauaccugagacaugacaauuuacaaaagaaagagguuuauugaacuuacaguuccaaauggcuggggaggcuucacaaucauggcagaaggcaacgaggagcaagucacaucucacauggauggcagcaggcaaaaagagagcugugucagcaaaaucccauuuuuaaagccaucauaucugaugagacuuaugcacuaucaugagaacaacacaggaaagacucgccaccaugauucaauuaccucccaccagguuccuccuacuacauaugggaauugugggaguuacaauucaagaugagauuugaguggggacacagccaaaccauaucauacacuaccauauacuaggcacuguauuaaggguuaggguauuaaauagaaucuuuuaucauaaagauuuuuguucaucucuguaaaauauuuuagacacauguguuuugcuuuuuaaacaaagaaaaagagauguuuuuagagauaagaugagacacauuguuauuuuccccaguucccaccagcccuucacaacugccaaccuggaaaaaacauucccagagcccaacaaaugcuggagcccuggaagaagggcuacuagcaggagcacuggacuccaaggaaugcagaccagggaagagaguguugggaguauuaaaauguagguuagaaguggaauaauggacaaguagagggaaagacuuucaaguccacuuuccagggauugagaaacuugggguccuucauccguuggcuuugaaugcagcccaagacaggcauuagcagaaaauuggagagucuccccgaccacaccucacuuccuagcuuaaaaaagcagcugcauuccucuuuaguuaaaccucucaguugggucuucuaaagcucuagcucucaccggaaucuggugccacuuucacucuugccuggaauggcauuggcucucucuauugcuaguuccugggcacucaucaaccaucuuaacccacuuggucaauaguuucuccauaauuauuuuuauuuuaaccauuuugaauguaccaucuacuuucugcuaggaccaugacugcaucugagguauaauuuuaaagcaacaaaugguucauggaaggguaacucuguuugugaugcccaagagaggagacuuagggcagauagagauacauauaaagcuacugcuguccuagagagcagagggacaagaaaaggggagagagaacacucauuagcaguuguguguguguagcauaacauaacauauauauauaugcauauauaugauauguaaucuuagaaacaacuaccaugugaaguagagcaaaugaucgcugaguuucauccuugcuaagagcaugggaaaauccacauucuauguuugcuuaguugcagaaagaauaagggaagcagaaacgucaggggucacauccccuaugugucaauuaaaggggugcagacucagaagguguccuuaccuacuuuauuuagccugcucuuccccacaaagaugaggaauacaggugacuuugaugucaugauagcaaucagaauguaaaagagacuuucaaaaagaccuagugcaacauggaaacaaggacuuuagucucugagcuuccuuauguaucaagugucauagaaaauguugagacaaagugguucugucauuucaacaacccauaaugagcagaagaaucuguuugccuuucaugccacugcagaugaacagguaugagagacugcacuuaggcaugaaagugccgcugccuagcaccucuaucccaugcucacauccgaaucuucucagguguggguaagacaucucaguucucugcuauuugauaugaauaggggcaaucccagaagcagcaacugagcucaugggccccaaaauuuccaaggaaucacgaggagaacuaggcuaaaugucauuauuuucugaccuucgauguaccuuuucccuagucacuugccaaucucuucuaaagggccucagucccuggaguggacccuaaugauuucuguccauuauuuggccuagaguagaauucuugcuuuucucaaggaaagaaacaaaaagaaaagauguaaccaaauguaauuuaugugaguuuguaaauugauauccgaagauuggaacugcauacagaugugucaaaaauguuaauuuccccaagaaauaugguagcaccuaauucuagcgacacuuguauacuuuacagauggcuuugcugugcuccugguaaagucaaugacuuucugccuuugaacaugaaaggaaaaagauguugacaggaauucuuuagggaaacagaaacuacauauuugcuuaugcuaaguuauggcaaaguucaguuuuauucuguaaauaaagcguugucuucauaaauaucagcuauauccuuuagaguaaagaaaguccucuuuauuaaaaaaaucuaauugaaacucuucaauagguaggcaagugaggugauugauauaaagauauacuuaaguggaaaauugguauucgaguuccaauaaguaaucaaucauauuguucuugguaauagcuuuuguugauucaucuuugcaagggaugucgggggguaggggggauugcugaaugaaauaaaucaggaaagaacccaagcauuauguuuaacugacuuaagagcaaaggaaagaacacauaaacacagaauagaauccacacaguaacuucauucuuuaugauugcucaggcauuuucauuauuugcauuuauguuuauuuucucuuuauccuccuguggcaauagauauggagauaaugcuuuaaauauugugauguaccuugaucuuuucugaagaaccaaagcuuuaugaaaucuugauacauuuaaaggagggguauaaagcucaggcaugugaaauguugaauuuugucuccccauaugacagauaaccaucauauaaaugugguuuauuagacuaaaaaaguagaacacauauuuuuagauuacaucuuggcauuucaaagaaaguauagaacuucaagauaguuugcuuccuggauauuuucuggagcugucuuugggccugcauuccugaaagcugucaaugcuacacucugcauacccagagcucgugcccuugggcuugaguacuuugugguuaauauuuaagaaccgcauguggagcuagauugaaggacagucacuuucuuuauucuuugcuaaaaccaauguugguuaguccaucaccuucuuaaacaguaacugcauucauacccuucaucacauccaucucucugucaaaacaugagugaaaaucaauuguggcauaucuagaaauacuucacucacuuccauuuugcuucuuaugugcugauguaccuuacucaauauuaauuuccuuuagaguuaaacugugggaaaacuugaauggaccuuugugguauaaaacuaucuaugugaccuuggacaagucacugcaccucucuuggcaucaguuuccucauauccaaaauaagaacacuugccugguuuaucucugagacuuuuccagcuccacaauuucucaaugauuagcaaaacccuaucgauaaagcaaugguaaugauuuauguaaauugacauucuuuuuuaugagguuuacaaaguuauuuuauucuacuccaggguuuuguuggaagucuauuacggaauuuuuauucaucaauacucagcagauguuaucagguucucuccagaaacuaccuuaauucuaccacagacuugggauauguuuggggaacaaugacaaaaaaaauaagucauaguucuuacuuucaaagagauuauugaguggggucagaccguggagaggugcaccgauagaggguggaggaagaugcggucaaagaagagaagguccugaaaacagaggaaacaaaggaagcggaacagugaaggcauaauggcucccugcuuguuuaggaaaaggcagaguuuguuguuuugaaaaacgacauuuagugucaucuucacuaaauauuaauaaugucuucuuacacguuagcuaaagaagaaaagaucaaaaauaaaccaggcccccaaauaauaaaggauuuaaaauuaaagauauauacagagcacuauaguaauuuuugaagugcuguucaguuggugauauaaucagaggaauaaugcuauuacaucaagugauaaaaaguaauuuugugauuuaauacucauucugaaccuauauuguaaugcuaaucucaucagaugauugacauucauauacuuaauuucccuuugagaaaucagguucauguauuauucugucuuguuuauaaaagcuacuuauuugguuuaggaauauuguuauuucccucuccaacaccaaugucugccuauguaauugaaaggaaauugcagugaaucuuccaacaaggaguaacugcuucccugaaauaaucaccugcagacauaauucuggcuucugugcguugucucgauagcagggaaggcagagggcaacuggggaaucugauuaucuccaucauaaucccacaacuucccuccuuucucuuuugcuuuuaauuacugcauuguggugaguuaagaaaagccuauacuauuuuuucuucuccacuaccagaaagagagagagauaacuggcauucucucucuaaggauuuuuaaaauacuuuuaauaaaauuuuaaauaguguaaugugugcccacaagcacauugguucuaaagauacuucaaaaauacuucagaaucaaaucuguaagaaaaaaaaauucaauuauuuauguucauuauauuacaagugauuuaaaaacugguuaucugugcaucaaaaaaugcaagccuauagcagcucugauucagugaauuccaguugcggggaggggaggagcccucagauauuuuuauaucauauuugaaaaaaauggcugauuauuauuuuuuuaauuuauggaauguauggacuuuaccagaguuucaaaaguccacuuuaguaccuauaagauauuuugaaaucaguuggccaauucuugccaucaaaaaauuguaacuuuaaacuugcagaaaaacuaguuggcucuaguccuaaaagagaguucuuaauugcaguuucugcauuuauuugucuaauagcaaauaaauuucacauucauuucugacucccuuucaaaagggcagguuaaucucaaaaggaaauauaugaguuuaucauuuucggcuaggauaugguuucuauuucuaaaauaguggcacaguguuggugaaugcuuugugagagcaaggaauugguaguagauuuuugcagaaugcugcauuuaccaaaagaaaaaaaaaaaccacuaggaaauugacaucuacaaaagcaaaguacuuaaguaguaaauuacauuuaccaaggaucacaucaguagugugcuuuaucugauuauuccaaucaaaagggggcaaagucaggauuuguagugauacagugguccuguagaucuaaaaucuuaaggucugaguuuaaauccaaacucuagcauuugcuaucuguguugggaucacuccccgacuucaucagaagaccugcuaacaucuagacuugucuguugucaccaccaucuccuuugggauaccaccucaagguacucaaguucgccuccagccuccaauuccuuuccugcggugggaagagaggggagacccagcuucauguugcucagugacuauagauucccaaacaaaugacaggggaauuuagaaacauuucugccuuaaaacucaaaugucauuuauaacucuaaacaagggaaucuggaacucaaaacauaaugauuuggucaucacuuugggaaauuuuuggcuaaaaauuaagaaugguuuccuucuccuuggcaggcauaaaguuaauuaauaaauucucuucauaaggcagcugguuaaaguuucagaacuccacaacuccaggagauacacauuugaaagaauauuuuugauaaccaauuaccuuuauuuucuaugcaagaaaauauuaaagaauauucagauacuaauuacacuaauuccucagccuucugauaaugagauaguucucucuuugaacucuuucaagaucuaauggcaucgagagacucuccuuuaugucguaaaacuaacagacaaaauuaccuggcccagcuuuuuccaccugagugaccucacgcucucuuuaauacccaaaaucuauugacagagauuaugucccauuauaauauucccuuuuauguuuuggcacugagcagugcaacugacagagcuauaacaaaguaacaaccacauucacaggacagagacggagucuuacagagacggagucuuacaaagacuaaaugacaucuuacgccuucauucucuuuuccuuguuaggaacucucauaaaaaagccacagccaugcccccucagccuguuuagcagguucaugcauuacagauugaaguauugucaccuaggaaguaggcagcuaauuuuuuccagcuucugaaacaagauuacaaagggguuccuggaauggcuaacuuuaccaacgggggcagaggaagauuaguuuuucauuuuuugaaguuggaaacguaacagugagaaagagacaaaauuaucucucaauaaauuaaucuacaaaaaaauaaauaaaaugcaaagcugguuccacagggaguuuacauucugggagccaaauaagauacauauauaaaacucuuagaacaaggucaaaugggauaaguguaguagugacauaggguagcacagaguuuuguuuuaauaucuucugcuaacuuuaaaaaauaaauaugugauuuuaagugcauauuacacuaauuuaauaaaaaucucauauuuugccuuuaugcucagucugaaacauggaagauuuaaaguuacuaauacuguaaaacugcuucagcucugacgaaugaaguaucuguguacagaaugaugaguuguuaguuaauaguacucuuugggccaugcuugggauauuggccuuuucuaggagucuguaugagaauagucauuuaucuccuuaugcucaaugcuuucaacuugucaaaugaccauguuucauaagauacaacauaaaauuguucuauaauuaacaaaagaaaaaagaauucuaucugcugagaaaauagaaaagacguuggagaagagagaauauuugacccagacauuuaaaauauccgccgaauuugcuauguguagauggaugaaaggucugccaagagaagugaagguugugaacaaagacauggaggcggaagaaagguagugugcacacugaaugcguugugccuuuccauaugacugacaugucaauguaaacuccacaaagggaggguuuugaucugguuuguuugccgauguuacuuaaguaucuggaaaagugccuggcauauaucaggugcaugaagaagugaauaaaugaagugucagaugcccagaauaugaauaauacuugauagaugcaguacuggcaacuuucuugaagcuaaugaagugguuaggacuccauaguucaacagaaaccaaguucacuuaagcaaacauggaguuugaguuuaucaugggacucaacaucaagaaaguguuuggaucuugaguagacuggagauggaaacagucugucucugucuuuugucacuucuuccuccacaucuguguggcuggcugcuauuucaguauccugguccaccugguccugaguccccauggugagggaaagcugacuccauagcugccagaaucacauguaguggcucucuuugaccaggucagcugcguagauacccucucuugcuccaguccucuguagcaagaggguagguuuaccacuaaggaucaggggagaagaacuauugggggaauuguuaagagcagacacucagaaaaauuggcaccuauaauaugcaauuagaauucauuaaaacauguggccagguauguucuuauuuuguguuuuuacauaucuaaucucuaaguacuauucauauggaauguauuauucuaaaaaaauugccuguuaguucaugcaguucccacucucuuuucaucucuaacaucuuggcaaucguuuaccaguuguugaucaccugucuccucaucuucuuucaacuuugcccugacucuaccagauacugggcaacaucauuucccagacauugaguaacuucaaaugaauguguucaugcuacuccaacuggcuuuugggaaagcacuggauagaguuuuugagcuggaacaggaaauuaucuuacuuaauuucuuucuuuuauagauaaaaagauggauccacaagauggacccauugguccauaauuaagggcuaguaaauguuuuguaaacauagaaaucaaaauuacuuuucugugauucuagaacaggaaaaaauggugaacuuuuagguauguugcaaagaacaguggauuauucuuugggcucuugggaccaacagccuuaguuuuauugcuuugcaagcuauguggucuugaauaaaccucaguaaggcucagaaagcuucaguguucucaaguauaaauaggaauaauuauaauauaauaacauuaauaguauuuaucucaccauccuguaauaaggaagagaaggauuaaauauugaagguuauauugauaaaugauaaaacacaugcaaugauuguaauaaguguguuagauggcaaaagaaaaauaaugaggaugaaauauuuacuuccaaugacuaaucuacacauaaucgugauuuuauguaugacugaauguuuaaggcugauuccauuuuagaauacaauauauaacauaaaaagcucuacucucaguuccaagaguuauaauuaguuuggcauggauuuuuauugucuuagaaaaaacugauauucaugguuuuuauaauucuaucuuuggguaauaggcaauuggacucucuuucuauauauauuugcuuauuaaaauguguuauuauaauuaagcuuuaggcuguguccacaagaugggaaaacauuggaguaaaauauaguaaaaccauagaaauugagaguggguugaaagucuuguuuaaucuguaauuacagaugaagauaguaagaauguaaauguccauagaagacuucaguggcuuuguuaaaggcauguguucaucaguguugaaguaaaacucacauuuugugacucugagcuguucacuauaauaugaaaccuaauccuaaaacacaauauuaaaacagaaaaaugugaagccauagaucuguaauaaagggccaccugauuguuuccugguggaauaaaaagacaguuuuauuuauaagauauaucauuuuuauagauaacaaugauucauauuaggaauaaaguaacaguuucaaacuaaaauaaugcuaaaguuuuucaaguacuacuugaaaauagcuauauuuacuuucaaaccuuuuccucuuugagucauuagguucaugauauuauauagcaauagggaaugaaagagaagcaaggagaagcaauacugggagauuacagagaagaaaggaaaaaaggcugagagaaaagagguugaggaagaaaucauaaaucuggauugugagaaaguguuuaauauuuagccacuagauggcgauguaauguaaggugcugucuugacuuuuuuuuuuuuuuuuugaaacaagcuauuugcugauuuguauuagguaccauagagugaggcgaggaugaagccgagaggauacugcagaggucucuggugcauguguguaugugugcguuuguguguguuugugugucuguguguucugccccagugagacugcagcccuuguaaauacuuugacaccuuuugcaagaaggaaucugaacaauugcaacugaaggcacauuguuaucaucucgucuuugggugaugcuguuccucacugcagauggauaauuuuccuuuuaaucagguaagccaucuaauuguuucaucuugauuuuaaguuuauucauuccaguuauuccuuuggaaaaagaguccauggaaauucaguuugggcagagcaggaaguccauuuuuguauguguauucagaccaacugucccccuccucccucuccuccucuucuccuccccuccccuccccccuccucucucaaccuuccaugaacugaaaucagguuuguuuugcaguucagcauuuugauagaagaugggauucuuuggccugaaauagcuuggcaucuggccaguucuugccuuugcuugccuucauccuauucaaggucccuuuugauccuguugaagcccccuccuucacuggugcuuuggaaguggacuagcuggcugggaauagaggucauauuguucuuaaggacggagcaaaaauuagaucucaguuuuaacuccacaggaagaaagaaggcagcggggcugcugcuggagccuagcauugcagggguauucagcuuccugaggcugaggcugggcuuuugagaagaaaugccucaugccuugaacaaggaaggggcaaugauuuccgccccccaccucugccaacuccuauugagccacacuaaaaaagagcuugagcagagugguaaagaguccccuuuucuauccaaugccaaauaggaaacauugacuuacuuuuacuuagacagaggucacaaccagcaaugauacugcagauacugcucaguuccuagugugaaccgucuugcuuuucagaacagcauaagaauuauuucugaguggaggugaggcuuguccaaaugucuuugcuaucauggauuuccugacuccuaccuguuugagguauguguuuaaagacccgacccacuugcugcauuuacuucucauuucuuuuuguucucuuugauuacucacuggugauuguuaacaaaucggucuggagugguggguaugugcuuuucaccuguccaaugcaacaauuaagucaaggcaggguauauuacugucaauaugugcaugugacuaaauauuucugagugcaguagcaaacuugcaaauugccaauugcuguugcuaucacaccuauaaaaugugucuucuucuucuauggauuuacagguucacgugguauuucugaugcgcuaguauaguaacagaacauauuucuccaaaaagcacuuuaaaucaucccaagaggauguugccagacagaaauaggaaaauuccaugcugagguuggugauuccugcuuuaguuucuccugcccagagaaguggguagcuuaccuuuccuauuugcugcaauaccuggcacgccagggugaugcaacugggagcuucugcacguucgcggggcaucugacauucuucuuucccucagcugugcauuucaggagaaugacuguggugaaaaacucuuuuaaaacucucuuuuaugauuguugcuuuuguaauugcaaugaagcaauuacaaaaucacaucucucuucuaggaggaguuuugcaauuuaggccuuccuucacaaagcuccuggaagagauuuuuagcuggugucuauuuuaggaacauaauguguagacaggaaugaauggccacagagauuuacgggaaaccaauuucuuggagagggugagguaacauuauaaaccacuagaacagagcacaaguggcugguuauaucacauggacccagcaauggaauuaguuuucauuaaacucacuguaacucauuuguguggcuguuuuuccuccuuccuucacauuguuugucuguuuuguuucaaauaucuauauaggaggccaggauacccagaguguucauacugguaacaauaacacauuggauuuugcugccaauacuaauagacuugguuuacaugcccccucuugcugggaaaugugcugucuggagagucauuuauuaugguaauuucucuuuaagacauggcaggagggauuguccaucuaugggcuggggcaaggcggggcacaauuggaggccuaguuaauuauacaguauucaagaaggcacuaaggagcucagucaggauucuguuguaccaaccagagauaccaggggcaaccagaccgacuagauacccaaaguaaacucuaucaccaccaacagaggaauccaguaagaaacauucuaguuccuuguauagaggguacuaucagggaauccagacaaucagagaggguaaacacaagagcaccucaucugggaauugcugacgaagaagagaaaaucuggggcuugcuugguguuaccucuaggacgucaccaaccaggcauuucucaaggguuuaugucggugugagccugacagugacacacaaaagcaucccuccaaaauuuagccuggggaccuugaaagguauugcuuucucccugggcaguuggagaggcugaaccuacuauuuucucccuguacucgccaaagggcacaaagccuacucucuuccagcuaccucagaauggggagggugggagaaacagaucccagagaaggaugggagagaaucagcaauugaagguccuguauagucacccucagggucaauggggcugugcuccgugagguuaucacuuccuuuuuaaauucuaauuagugaaugaagcauguuccaccgcucaauugagauugcauuaguuuaggguagggugggaagaaauuuauucucauugcacuugugaucagaaaaauaaguugugacagaauuccccaagcugccccaaaguuugcuuuuccaacuuuuaaauuuuguccacauuccuagauuuccauuuauuaauuguuuuauuuaucaaaaacauauagcauuuacucugugccagccacuauccuaagcaguacuuugcaaauaugaucucauuuaauccuaugagguagauacuauuguuaauuuuacaggugacaaaaccaaggcacagugagguucaauuaacuugcuggguuauacaguuaguaaguggcagaauccaagcaguccagccacaccguggccauggcgucuguguucuugauguuugcucaucauccaugugaugguagagcuacagcuuagccaagagacucaggacugaaguugggugcagucguacaugugagcuguaauucaucugcuuucugacaugccaaaauuccaaaaacaguuugguuuagaaugauuacccaaauccacuccauuuguuuguuuguuuguuuguuguuuuuuugagacagagucucacucugucacccaggcugcagugcaguggcacguucuuggcucacugcaauuucugccucccggguugaagugauucuccugccucagccuccccaguagcugggacuacaggcgagugucaccaugccuggcuaauuuuuguauuuuguagagaugggguuucacuauguuggcccggcuagucucgaucuccugaccucaagugaucugccugccucagccucccaaagugcugggauuacaggagugagccaucacaccgggcuauuuguuaaaaaauuaaaaaaaaaaaagcucuccuguacaauagaagauagaagggucugcguucuaagugcaggaauguggugaauaaagcaaaauuccuacccacaugcagcuuucagucuggugauagaguuggacaguaggcaaaucaaugugcaaagaaaugucaguaaauguaaguucuuugaagaaaaauacugcaagauaaagagauagugaggaugagaggggcaugcaaacagaaaauaaugaaagagguggagaaaaaguuuuuuuaagcagaaaucuaaugaggccaaugauggauugaaucaaaggugcuaaagggugaagugccucacagguaugaagaguggcacaaaccuugugggugauccugaaaguaaaagaaacgaacagaaauagcaccauagaggugugcagccagaucuguggaaucucagagauugggcuuagggcucuaacugcccccgacuuuuaaaaaaacaaaucaaagaguuaugucaaauaaauuuaaaacauucaauguuaacaaguuauuagguuuaaaaaaaacauaaaucagucauuuucacaaaaaaaaguuuugagaguuuguaaaguucucugaaaaaauguugcaguuccuagaaugcaaaaaaauugccucaaaaauguugaaaagaacugauccaaagguagugaguuaucucaguugauuguucacagucaguuacagaucaaacuccuuguucuacgcuuuccccucuucucacuacugcucuugucuaaaaacuuuuuuaaaaauuaaaaaauauugaaaagguacuauuugaugaaaaaaaaauuguuugaaugagaucauugguuagaaugauauagucacccagucaguuuuucuuccuccagaaaugauacacugaccaggugcaggcaagaaagagacacuaagcaugaaaaccaguguuuacaucccccauaguggccaggacacaggagcugcuuggagggauuugaacaaaucuuuuuuuuuuuuuuuuuuuuuuuuuuuuuuuuuuuuuuugcaaaugaaugaguaggaaugugauuucaaaauaauuugauaaacaucagcuuucauuuucaucuauguuaaaacuuuuguuaccauauuuuuauuccuucaagacucauauuccaaugguuuaucuuuuuauauuuuuuucacuauuugcuuccccucauucucaguuaccuauggacacuguaguucuucucuagaaaaugugaauuugcuucucuucuaacuuagaaucaaccugacauuuuagcuuuucucuguaaauggucaaaagucuuugccuuaucauauugccuguuucuccuuuggugcucuaccuacaaacuuagauuuaauuuugaugaagaaucuacucuaacuuuuuucuuuugucacuugugcuuuuagucucauguauaagaaaccguugccuaaucugaggucauaaaaauuuacuucuauuauuuuucaacuaguuguauaauuuuagcucuugcauuuagaucuaggauucauucugagucaacuuuuugcauauaaugugagguagggguucagcauuacucuuuuguuuguucauaucuaguugucccagcaccacguguugaaaagacaauucuuuccccggugaauugucuuauuaacauuguuguccaugcguuuaugauuuuagcaucaauuauuucuuacaguggguacuagggauauaucuuuuaagaaaaggucagugagauucuuuguucuugagaauccacauaacuuuaaagaaucagaaaacugauccauauacccuuaacuauuaaacacuuuauugaucuaacuucacaacaaaauguuucuucucauuauuggaaacauauucauuugugacuccacugaaaauuuaaggagauaaugagcaaauauuuccagggaaagguuauauuuauuccaaagaaacauauuuacuguauugcacaugcuuucccaaaguuacacaaauauuauccauguucuuuguaauauauguugcuaguaugcuuuuguuucacagauaccauuggggaaacuacugaacuugagauagaggugugccauucaaauaggguugguuucuguauuaguuaacuugggcuaccaugacaaaguaccacagacaggguggcuuaaauaacaguauuuaucacaguucuggaggcucgaaguccaagaacaagguacugggaaguuuggugucuucuaaagcccgucuccuuggcuugcugaugucugucuuuuccucugugcaugugcauuccuggugucucuuuucugucuaaauuucaucuucuuuuaaggacacaagucauauuggauugugguucacccuaaaagucucauuucacuaaaccacuucuucaaaggcucuaacuccuaacacagucacauucugagguaccggaguuugagacuccaacauauggauuuggggaggauacaauucagccucuaacaguugucucuggcaauacuuaugacuacuaaaaucauaagcaaagaagguuaaauugauauuuuuuuguuguugaugaaacuguugugguuauuuuauaaaugauggauuuucauuauucauacccuccuccuacuggauaauaaugaguuaucuguguauguguuaagauucuaauaaaggcaauuaauuagguuuguaauuacaggcaugaugacuaacaaagugggggcagaaauaaaaugauggugacacugauuccacugcugugccuauaaugucacauuuacauucaugaucugugauaagaauuaagaugcucauuuauuucagugaggaaagugacagaaaaggauauaaaauuaggaauucauggggaauugguaaaaaaaaauuaaaguauuacaauaaguaacugaaacugacucagguuaauuuaaguauaaaagcaaugucuucaaaagauauuauaguucacagaguuaagggauagcuacaaucuagacugaaaaaugccaggagcagagaaaacuauaagagcagauagcccaguugguagacuuuuggugguuucuguaaggugcuguaaucuagaaugaaucagcucaacugcuuucaggcucuuugucuuucuuucuuuuucuuuuuuuuuuuuuuucuuuuuuuuccugacauucauguuuaacaccaaaauuccaggaaguaaacaucugguuggucaaguuugggucaugaaucugauccuuuuaguuaagaguaaacuuaacuaacaguuccuugacugacauuuccaccaaacuauccccauauaggaaaacuaauucaacccaaacaaaauuggagagauuaauagucuacauaggccagauacaguggcucaaaccuguaauuccagcacuuuggaaggccaaggugggcagaucaccugaggucaggaguuugggaccagccuggccaacauggugaaaccccgucucuacuaaaaauacaaaaaaauuagccaggcaugguggugugcaccugcagucccagcuacucaggaggcugagccaggagagucacuugaacccgggagguggagguugcagcaagccgagaucaugccacugcacuccggccuggcgucuggaugacagagcaagacucugucucaaaaaaaaaaaaaaaaaaaaaaaaaaaagagaaaagaaaaaagaaaacagucuacauacacaaugcuggaagguugaaagaauggcuaaauaaaucauagucuaggcaaaugaugaaauauuauaguaccauuaaacauaauguuucaaugaauauuuaauucuauauaaaauugcccagguuauaauaguauauuaaaaaguaccuuacaaacauauauaucuaggauggccccaauuacggaaaaaaaacaaacauguuuuuccuuagaaaaagcccugaagauaauauaauaguuaucucugguuuauagaauuaggauuucuguuuucuucuuuauaaaguuuuuguuuuaaaaauagaauauuacaucuuauuuuuucuuauaauaaaaguaauacauaaaggaaaaggaacauaaaguacauaaaaaaggaacauaaagugcauaaaacaaaaaaaaaauuuaaauagaauauuacaucuuauuuuucuuaugacaaaaguaauacauaaagcaaaaguaauacauaaagcaaaagggaaauauaaauuaauaaaaugaugaaauaacucacaauuuuacacaacaaaauuauuauuguuaauaauuuauuuuuucaaaugcuuugguauuguuucuuaccaaacaauuuggcauuguuuugguauguuuucuuaaaauaaaguucaaaauaaacauauguugccuuaaaaacuagaauaaaaguguacauuaguuuucaaauagaauuuaguaaucuauuucaugcaaagauacucauuguaucuuuaaucaaaauaguaaauuuaguuuaaauuauugaugaaacaauugaauguuugaauauuuugucuuuuggaauauuaauaaaacuaggccacaaaccuuguauaauaaaaguacaguauuuugaaaauuuuguaacaauggaaaagcuuugggaaucggucuaauauaaaauuagacuugaaauagcaaauuggugguguucugaaaaucauguuacuugguaaccuaaguuuucucuuuagaacucagcacgaauuuuaagaaauuuaucuuauauuuauaaaacaucuacuauuugcaaugaguuguuuuuagcaaaacuugaccucaaauugaacauuugagaauacugaagaauaaauaagaagcaccuguaaauacugacauaguauguccuuaaauuuuuaaacuacuuagaaccaaauucaucaaguuggcaaaaugaaguuacuagauuaucaaauggaauggcaagugaaaaugagccagagguggcagaauggaguaagaaggguaauuauuagggaaugcugcauuuggagaugugaaauuauauguguugaggaugugaggaaagaaaucugugugaggagaaauagauuauuaaugauguaacuuaguaacaucagauuaaggguccccaaacccugggccacggaccaguacuggucccuggccuguuaggaacugggucgcacaguaggaggugagcagugggccagggagcauuacagccugagcuccgccuccugucagaucaguggcggcauuagauucucauaggagcacaaacccuauugugaacugugcaugcacaggaucuagguugugugcuccuuaugagauucuaaugccagcccccacuccccacaauguccguggaacaacugucuuccacaaaaccagucccuggugccaaaaagguuggggacuccuuaucuagauuauuguaaagcaaauauucauaauuuuaagauuaaagaaaaaauccaauaaagaugagaaaccggaucucagaguuuccaauuacauauucauagaggaaagaaagcuaagagaauucugucacauacauauuucaaucuaagaaauucaguggauuugaaaauccuggaaagaguuacuuugagacuucacaaaugcuaccaggcagcaguuuugauauuacccuggaaugugauaugccacuuaaaaaggccaguaguauuuugggcuauguaugucaguguguugggacaaaaccaaggagaaaacaguccggugucaggucuagaauaccaucauuucagugccaccugggccucagcauuucagguuucaggugauuugaggagucugugaggucgcacaauaauauuuaaggccuuuaaagggucaaucaacuuguacaaaugaaggcaagagugccuuuggaagacauuccaaaaaggaaguuugagcauacucaagaagaaucuagccacugcacuccagccugcgcaagagagugagacgcuuucucaaaaaaaaaaaaaaaaaaaaaaaaaaaagaaacuaaauagaaaucaguaagcaaagaaaaagaaaauaggagugugauuuuucuuccugaaaucucuguggaauagcaaaaaguggaaucuugacuguaucuucucugggaccaaacuuuaucuuacucucccugacucucucucucucucucucuuuuuuuuuucauuccuaggcauuuuguuuuacucuguuuuugcauacucugcugauuucuaacccuccuuccauucaguaacauauaaaaaaaacuuuucacagucauguucucagaauguucauagucuuuaaugcauauagaauauaauccaaaaaaucaaaaaaaaaauuuuuuuuuuugagacagagucucacucuauugcccaggcuggagugcaauggcaggaucucggcucacugcaaucuccgccuccuggguucaagcgauucuccugccucagccuccugaguagcugggauuacaggcgcacacuaccacacccagcuaauuuuucuauguuggccaggcugaacuccugaucucgugauccgccugccuuggccucccaaagugcugggauuacaggcaugaaccuccgugcccggccaaaaaauucuuaaugugauuuuagcaguuauuuucaaaaugugguccacagaugcucuugcauucccuugagacuuuuuaaaugauucaucagguccaaacuauuuucauaaugauacaaaaacauuauuuaccuuuuucacuguguugacauuuggaagaacaaugaaaccccuagccuuaacacuuaucaagacagugacaacaaacuauacugucauuguauucuucacuguaauucauucccaguaaaaauaaguaaauaaauaaaugaauaaaauuaaagccaguugcacuaaaagaaugucuuugacgaaacacuagaaauuaauuuuauuuaaucuauaccauuaaguacacauauuuuuaauauucaguauacaugaagaaauggaaaguauacaugauuaacaucugcuguauaucaacaauaaugcugguugucuuaagguaaagcacuuguguaguuguuugaguugcaagcuaaacuagcuguacuuccauagaauacuauuuuuauuugaaaaaaugacugagagacaaauugugauuauucaaacagauauugaaaagacaaauuuuugaaaauaaauggagacugucauuuuaaaaauacauuugacaauauuuguugucagugacaaaauuuggccuuucaagagaaaauuauuauuuugaaaaagaugcaucugccaccaugagcucaacagcuucucaaaacuuacaggguuucugaugugauuagugguaauauuaacagaugaauaaugaaaucuuccaauauuuugaagaccugcauaacuuagccaagcacucaucccauuagaucuuuuucuuuuagaaauaugguuauuuucacuugaaauuuauuuuguugacaugugauuuaugauuauaauuuauaaauuuauuaauugaugugcuugugauuuuucugcuuucuaacaugguaaauggcaauacauugaacucauuauaaagaagaauuuuuuguuuccucaauaauauuaacaaucaaaaggagucuugagacaaaaaaauuaugacaaggaugaauuugauaauucaucagauucugggacacugaaucugaugaauuugauaauucaucagauucugggacacugaaucugaugaauuaucagauuaucugauaaauuauucagauuaaguuuguugcacuguauuaguugagauuauuauaaugcagauaauugagucccccagaauuaugcaggauagagaagauauuugucacauuacacaaguuaguacauuuuucauuacuguaauaugagcugcacauaucaguuuaguucaguaaguucuguauaaagugaguaaaaauuguugcaaagcaaaucagaggauuauaaaauauaaauguucuaauacucuuguuaggacuuucaucuuuccucaccuaaaccaauguaagaaguuucuauuggucuuuuucuaaauguucacccacucccuucccucaauuagaaccugaucuccauacuaccaccagugaccuuucaaacaugugggccacaucucuacuuuuuaagacuguaaguuauauccuggaguaaaagcuauucaguuauucagcauggcuggcuuucaugagcuguccagguuuauuucuuaccccauggucgaucuaccuuaccauuaguccuucagaaagaacuaauugcauuucugugaagaccuaaagcuguuucuaucucuaggucuuugcuacugcuucuuuauuuggugaauagccacgaccucuucuuccccaaguaugauuaauuuccuuuuguguugugccuagguccuguauacauuucuaucaucucucccacugcacuuuauugugcuuauuccccugucuuccucugcuauacuguaccuucuuugcaauauggugcagcauauugucugaugugacuaagucucauugccacugccuacuuccguuuucggugucuagguucucaauagaaauuguuaaaugaaaaugaaacaaaacaaaaacauuuuuaggguuaccuuuaauauuaauaccugacaguuuuacauuuuauaggaugcuuucgcaaauacuguuuuuguagaaauaugcuugaagcauauaauaauuuaaauaauucuuuuauuucuuaugcaagucccaaacuccuauucuaaacucauauauacuaugaguauugaacuacuuauauauacuaugauuaagcacugcuuuucaaaguaauucugaaugcauuuuuucuucaaauuauuacuguuagcuguuuuuacuuauucagugucugagaaauuugauuacuucuccuuuuaucauuuugagguauucuuuuuuguuuguuuguuuuagacggaguuucgcucuuguuucccaggcugcuggagugcaaugaagcaaucucggcucacugcaaccuccacuuccuggguucaagcaauucuccugucucagccccccaaguggcggggacuacaagcaugcgccaccaugcccagcuaauuuuuuguauuuuuaguagagaugggguuucaucauguugaccaggcuggucuugaacuccugaccucaggugauccaccuguuucgaccuuccaaaguuacaggcgugagcuaccgugccuagcucauuuugaggcauucuuuggucuuugcuugagucuaauuauuagcaaauuauucaaguacuauauuuuauaguuauggaaugcauugauauuauagaaaacagaauauuuagaaaagcauaaagaagaaaauaauauuugugaucucauaaucuaugugauuuuccccacaauaauaaaauauugcuuuuaacauguuaauauuuugcucuaaaccauuucucuuccuguuugaauaaugggauuccuaugguguuuucaauuuuguagcacauauuacaucuuaaacauuuuuuaaugccaucagaauaguucaaaaguauaauauuaauggcuucauaauauuuccuuguaguuuuacauuuauuuaauuauucugauaaucauggaaauuuuauuucauuuuaguugcaucauuacuuuugaaguaaauuuaaauaacacauuaaaaauaccaagaauuuuacauuuuuauuaauagccaaaagaucaucuguuguauaaacagaucccaaaacuuaggguuuucuugauuaaggaaaacagaaggccaacaaaguccaugcaguacacacaagauauagucaauuaacacuuaaaucugaaggaaacaauuccagugcaugguuucuugcacugggcuuguucucuuucuuuuugauucucccuucugguccucacugggaguaggaaucacacaaagagcuuggcucacuacuuucauucacucucuccuucucucaucauuuguucaaaaugaacccauuugggcuaguucuuuaauacucucagauguuuuccugcuuucagaaacaggcacaaaauaauuuauauauuaacauugaacaacucucugaaaaucauugcauuguuuaacuaauuucugauuuuucuaccacuuuacagcagaaaacaacuuucuucuuagaguucuugauacaaacuuuuuaagaaauuuaaaauauacauuaaaaucugucuuugaugagcauacuaaauaauaugauagcuggaagggagguaaggaagugguaacaguuuuaaaguucuuauuuauuuuucaaauaugaauaguuacagguuuguuauuaucuaagaaagagaauuauuaauauucuccaugagauccaaggaucacauuauaucucaaaccaagguaacauuagagugugaaaaacaauuuuaauuauuauuuuaucaauuuuaaaaauuuuuguauauuugugggguacaagugcaauuuugcuacauugauauauugcauuuuggugaaguuacggccuucagugcauccaucacuggagcaaugugcauuguauccaccaagcaaccuccuaucauccacccaccuugcaccuacuacccuuccaagucuccauuguguuuuaucuuaaaguguaguaauucuugcccucuagcaauaaccuugguguaugcaucuaauucucagaggguaaucuacaauuucaaaacuuuaaaaguagcuguuuaaaauuauagcacaccuguuauuuuauauuuaugauuaguauauauaucgguuguucaagcuaaaagacaaaugacaggaaacauuuuaaucaauagcauucuuuuagcuauuaugguaauauucauauuuauugggacuuagaguaaaacagucaggaaguuggucagagcaagaaauaauuuucucauucuuuuuucauuuacuagucauucauuuaacaauauguauugagaaccuaguauauuuaauacuaggugccaagauaucuacucuuaaguacuuagauucuaaauuuaaaaaaaagccaaguacuacuguuuuaaccacaccacuucugacaucaaauaugugggucguuuuguuuuuguuuuuguuucuguuuuucccucaccacucaauugucugacagccaguugagugucccacaauucaauucaauaauaacuuggcauuauccucagauaccacaagucaauggcucagucucacaaaacugccccacuucaaacaucaguugcaagacccaggccucuggaacuucugacugaccagcuauaaauccuccaguucaauaaugugcuacaacagcucacagaauuuaagagcuuacuauuuccaguuuauuguaaaggaacagccuggaagagacauauagcagaaaguauaggguaggagaagcuauccaaacuccauaauuuagaguuuuuauggaggucucauuauguaggcauaauugauuaaaucauugaccauuggugauuagcuuaaucuucaaccccuagcccaucccuugcagaugcaggucuuucuagugacuagccucaauccugaagcuauguaggggcccucagccacuugucaucucauuagcauacaaaaaggcacuccagagauucuaaagauuauagaagcucuuaugucagaaaauggaacuaaggccaaauauaagaaagaugcugcuaucaccaauauuaaucaggaaauaacaaggguuauaggagcucugugccaggcagcaagaacuaagaccaaauacaggcacaccucagagauauuacacauuugguuccagcccaccacaaaaaagccaauauugcaauaaagugagucacacaaguguuuugauuucccagugcauauaaaaguuauguuuacaccauacuauagucuauuagguaugugauaguauuauguugaaaaaaagugcauaccuuaauuuaaaaaugcuuuauugcuaaaaaaugcuaacagucaucugagccuucagugagucauauaaucuuuuugcugguggagagucucgcuuugauguugauggaugcugacugaucagggugguaguugcugaagguugagaugacugugacaauuucuuacaauaaaacaacaaugaaguuugccacguugauugaucuuccuuucacaaaagauuccucuguagcaugugaugcuguuugauagcauuuuacccacaguauaacuuguuucaaaauuggagucaaugcuuucaagcccugccacugcuuuaucaaauaaauuuauguaauaucuaaauccuuuuuugucauuucaacaauguccucagcaucuucaccaggaguagguucuauuucaagaaaucacuuucuuugcucgucuauaagaagcaacuccuccucucuuaagguuuuaucaugacauugcagcaauucagucacaucuucaggcugcauucuaauucuaguucucuugcuauuucugccacauuuacaguuacuucuuccacugaaucuuguaccccucaaagucauccaugaaaguuggaaucgauuucuuccaaacuccuguucauauggauauuuuuaccuccucccaugaauuacaaauguucuuaaugggaucuaggauggugaauuuuauccagaugauuuucaauuuacuuugcucagauccaucagaggaaucacucucuauagcagcuauagucuuauaaaauguaugucuuaaauaauaagacuugaaaauaaaaauuauuccucaauccaugagcugcagagugcguguugugcuaucaggcaugaaaauaacauuaaucuccuuguacaucuccaucagagcucuuugcaacauugucagucagcgguaauauuuugaauggaaucuuuuuuuuuuuucugagcaguaggucucaauagcaggcuuaaaacauucaauaaagcaugcuguaaacagaugugcugccauucaggcuuugcuguucuacuuauagagcacaggcagaguauauuuagcauacuucuuaagggcccuaggauuuuuuugacuaguaaaugaaaauuggcuucaacuuaaagucacuggugacauuagcuccuaacaagagacugaaccuauucugugaagcuuuaaagccaagcauugacuucuccucucuagcuaugaaaguccuagauggcaucuucuuuuaauauaaggcuguuucaucuauauugaaaaucuguuguuuaguguagucaccuucaucaaugauuguauuagucuguucucacccuacuaauaaagacauacccgagacuggcuaauuuauaaaggaaagcaguuuaacggacucacaguuccacauggcuagggaggccucaaacaaucaugguggaagaugaaggaggagcaaagggauguuuuacaugguggcaggcaaagaaaguuuguguagagcaacuccccuuuauaaaaccaucagaucuccugagacuuauucacuaccacaagaucagcaugagaaggaccugcccccaugauucaauuaccucccacuggguuccucccaugacaugugggaauuaugggagcuacaauucaagaugagauuuggguggggacauagccaaaccauaucaaugaucuuagcuagaucuucuggauaacuugcugcagcuucuacaccaguaccuacugcuuaaccuugcacuuuaauuuuauggaggcagcuucuuuccuuaaaccucauaaaccaaacucugcuaacuucaaacuuuucuucuguagcuuucuuaccucucucagccuucacagaguucaagagaguuagagccuugcucugaauuaggcuuuggcucaagggaauguuauggcugguucaaucuuuuguucagacuuucuucauaucagcaauaaagccauuuuacuuucuuaucauuuuuguguucacuggaguagcacuuuuaauuuccuucaagaauauuuaagaauauuucuuuuucauucacaacucggcuaacuguuugguucaugaggccuagcauuuggccuaucuagguuucaacaugucuuccucacaaagcuuaauuauuucuagcuuuuaauuuaaagugagaaacauucaauucuuccuuugacuugaacacuuaaaggccauuguagggauuaaaaaaaaauuuuuuuuauuuguauggcuacauaguagguguauaccuuuauggguuacaugagauguuuugauacaggcguaucauaugcaauaaucacaugagaguaaaugggguauguguccccucaagcauuuaucauuacuuuguguuacaaacauuccaauuauacucuuuuagcuauuuuucaauauagaauaaauuauuguugacugugauaacuguuguguuacuagaucuuauucuauuuaacuacauuucuggaucuuauucuaucuaacuacauuuuuauacccauuaaucauucccaccuccccaccacccacauaguaggguuauugauuggaauaauuucaauauucuugugucucaaggaacugggaagcccaaggagaggaagagagacgggaacagcauguugguggagcagucagagcagacguaacaccaauuaaguucacucuuauuugggugcaguucuugccauccccaagcaauuacuaaagugacauuaaauauuacugaucacaggucaccauaacagauauaauaauagugaaaaaguuugaaauauugcaagaauuaccaaaaugugacacagauacacgaagugagcacaugcuguuggaaaaauggcaccaaaauugacuugcuggauguaggguugccacaaacuuucaauuugugaaaaacuguaucugugaagcacaauaaagcaaaguacaauaugucaagguauguauguauauacuucuuaugauaagaccacaccaaguauauaaaauauuuucuaaagauggcacuuguuacuucuuugagacucucaauguguugcauacuauguuuaagcuucaaauuacugaucuuaaggaaaucaauguucuuaucuaucuguacuguuaucuugauguaaauucaguaguguaccuaguuagucagaguaggauccaaaauuccaaccuaaauuuugaaacaaagauuuuucuuuauuauaacgcccaacauaacaccaagaguaguuaauaaacauacuaagaugaacaauuauucuugacuuuaggcaaaaagaaaauuacuaaaagauguauuuauuaaucaaaugcuguaauuuuuguuauuauuucuguaaaguucuaaacuccuugaaauccuauagaagagaaaagaauaaaaaauugucaaggcauucugauucaaacagaaaaagaagggaaucaaauaauuaucacugcuuacaugauuaucauuguaguuuuagcuccuuguuaguucagugcuuuuuuguauauuuauagaguugugcagcaaucauuacaaucucauuuuagaacauuuccauugagcuaaaaagaaacuugaugcccacuuguagucacucucuauucccacucccaguccuaggcaaucacuauuugcugucucuguacauuugcuuauucuagacauuuuauaugaauagaaucaugcaaugugucaucuuuugugacuuucuucuuucacuuaacauaauaucuuugagauucacucaccuaacagcauguuucaguauucauucauuuuaauugaccaaucauacucccuuauauggauauaccacauuuuguuuauccauuuaccagcuaauggacauuugggugcuuuccacuuuugggcuauuguuaauaaggcugcuaugaacauguccauauaagucuucauauggauacauguuuucauuuaccuugauuagauaccuaggaaugaaauuacugggucauauaaugaaucuauguuuaacauuguaagacacugccaguguauuuccaaauggcuguaccauuuuacauuccuacuaacaauauaugaggguuccaguuucucuauauccuucccaacacuugugauuaucuguuuuuuuuauuauuauuauagucauuccagugugugugacgugaugucucauuggguuuuuuauuugcauuuccuucaugauuaaugauguugagcaucugaugugcucguugauuagucauuuaucuucuuuggacaaguaucuacccaaaucuucugccuauuuuuauaguuagguucuuugggguuuuuuauuauugacuuguaagaguuuuaaaauauauauauauaugccagauacaaucgcuuaucagauauaugauuugcaaauacguucuuucaaucuguggguugucuucauuuuuugauguugucuuuugaagggcaaaugauuuuuuaugaaguacaauuuaucaauguucucuuuugaccacuuaugcauuugguguugcagccaagaaauuauuaccuuauguaugugcaccauauuuacucauauuuuuaaagaauuauaguuuuaguucuuacguuuaaauuuaugauuaauuuugaauuaaucuuuguacauuguuauccacaguuucaaauccuuccuuuugcauguggauaucugguuuuucuaguacuaguugcugaaaugauuauucuuucccaauuaaauuauguuagcacccaaagcugaauugauaaaaauuguuagccaaguuguguucucuucuuauuuauucaagaaugguucagaauaagaacuauugcuacuuuacaugugucagauaucuaaauauuaagaaaaguaugugaucacuauaaaauucauacuuuccaguaaauuacauuuaccauacaauguucaauacuguaacauauucuguauuuuaacuuuugauuuuuuuuuauaacuguugaauuuugaacuaucguguuuuguaaccucucacucuuagguguuguuauuccaaauauuuuauuaauuaauucagcaacuauugugugacuguuauggguaaaguacuuugcacgauacagugaagaaugcaaagguaaaugcugcucucaaggugcuuauggacuaaagcaaaaaacaagacauauucacaagcaaauauacugggagguagaagucagucgucaaguaacaccagaguugcagauaaaugcuuaugugaauucgaagauuacuugcuuuuuguuucagaaaagugcuaguggaugaagagaucaacagccuauaugacagcaaauuugguuccauguuggucuauacaaguaguuaagggcaaagaauaagcaguaaguuucugaugaauauaaauaaaauguauguagcuguuaagaaguauagucugugauuuuaaaaaaacaugaauaaugauauucauguacaagacaugacaguuaccaguguauugccucuuagcucucuuugguagcuaaccagaaauaguguauugggcacuuaaagcauuuuucuuagaccgugagcauaacguuacucuuugucaguagagggcagugaagggucacugcaggaggaaggggcuucucuuccugguucuaaugcuacauuuugauuuuacuucgaucauuagcaauguggaccauuagcaauggaccauuggcaacgugcuuguguaaugacaucuggugguguuuuuccccagccacaugcccagauggggcagucuguuggugacuucacagccucuauauaagggccuagugaccacuuugccacaguucucccagcacugacaccgcacacugccaacacagacacauccucacuucagugccgcacuccuucugaaggcccacccaccaaccuuagcucaccugugcccuaaagaauuguuucugcuugcccaacaguagcccaacuguggaccagagcuccggccaggacaccccagcaaacuauucugcuguagagaaagagggcuuccaccacacuuuucccaaugaaguuuggaccccaaccuugggaugggaaauccuuccaguucacucuucuuugaguccucuaccuuagcuccaggauacccuuuagauucucuuacaucuuuaugguuacucuccuaucaguacuuaauaauucuucauauauuaaacuuucucuguuuaaauuagcaugugguuucuguaucuuuuuuuguuuguuuuuguuuuuguuuugagacggagucucgcucuaucgcccaggcuggagcacaguggcgcaaucugggcucacugcaagcuccgcuuuccagguucacgccauucuccugccuuagccuccugaguagcugggacuacaggcacuugccacccagcccggcucauuuuuuguauuuuuaguagagacggguuuucaccguguuagccaggauggucucgaucuccugaccucgugauccacccgccucggccucccaaagugcugggauuacaggcgugagccaccgcgcccggcccgguuucuguaucuugauugugucccagacugauaccuguugccacaaguuauuuugcucaguuaauauuacugauuuucaaaugcuucaguuuauagggguaaagacaauuucuugaugcuaucccugaaaaggaauuggacaaguuuaacuuaugucaucuucucaugggcuucauggaaaauagccuuuuucacuagugaauauuggauaugcucuagcauuuccacugagaaauaaaaauuaggcauucauucaaaaaaguguguuugauccuauuucuaauucaaaugcuuugauuauuauugaguuauucauauaguagauuuucuaaggauuaauuguuuuuggccaagauaaaccaaaugugguagauguaaacuauuuucauauggucaaauacgugaugauuauuuuaauauaaaggguuucacugaagcauaacuacaauguaaaggguuucacugaagcauaacuacauauguagaaguuuuaauguguaugaggucuguaauucauaaaauuguugguugauucuuucuguuucacuucuauuggcaaagguuuaauuuacauucaggccuggugguaacccuguuaauaaccaaauucauucucucauuuuaaacuuauaacuuggcaaaagggaaacccuugaugaaguuguuuuuaaacuuuuaugaaugauucuuuuuaaccuuuuuaaacucugaaaccuuuuaaaagugaaaauauucaucacuuucuaaagaguauccacuuuguaagguccagguacagcaagcaaauauguauaaaacauuaaauuaagaaaacuucacacuuuuuccucuauagcaaaaauccuaaggaguaagacauaugauauaagcuauuuccccuaggacuucacugagguuauuugaaacauaucagaagcugagaaauuacgucauuucuuuugcuauuuuuauuccuugaggaaauaacuuuuuucaggaccaugauaccaauucuuuucuucuuuacaagcauuccugugcuuucuuacaacagcauacuggcaacacaaaguagccaaaucggcucuaagacaaaugucugugaaggcuguuggcugagaaauaucauuuggcggucucauagucucauauauaaaauguaccuuaauuuuuuuauuuuuuugagacaagaucuggcucugucacgcagguuggagugcaguggugccaccuuggcucaugcagccuccacuucccaggcucaagcaauccccccaccucagccuuccaaguagcuggaacuacacaaacgcaccaccaugccugguuaauuuuuguauuuuuuguagagacgggguuuugccauguugcccaggcuggugucgagcuugugagcucaagcaauacaccugccucagccuuccaaagugaugggauuacagaugugagccaccaugcccagccccauuuacuuuuuaaaccaccacaaucauuauuauaucguagcacucuagguucacagaggugauuagggacaacuauguugguaagucaaugaacucucuucuguucuuaccuuacuagauuaugcuguaacauuagacaauguucaucauuaucucuuucuuacucucucuucccuguuacuucuucuagaaaaugggucuuuguuuguauucugcaaagauuaaaguugaauucuaacaaugaaagcauucauuuugacuaaacucuaguuccauaauuuuucuuagaaaguauuggcaaaucuguuuaugucucuuuucaauuauuuuuccuacuaucucuauauaccaccaauaaaauuaacuaacuaaauuuaguuuuauuucaaaucacucagugguucuuuuauucaaaagauauuaauaagcauagugucaggcacuaugccaugaacagagauacauuuccaggaaauugauauaauggaaagaaacuagggcuagagucagacaaaucagcucuagcuauacacugcucuagcuauacacaguaucacuuuaauuagcuacauuuuuucugacuuuuauugcuucaucuguaaaauagugauaauaauauauauuuucacguuguaugguaaagucuaaaguuauguucaccaauacauaaugcaguucuuggcacuggguagaugcuuuuaaacacuauuaguguucuuuaugguauuuuuucuaagugacuaaaagaucauauuaauuuuacaugccucacauguccucaguccuuuaccuuuaucuuccuggugaauuuccuuuuauuuuacaaaacccauuucagcucucaccuacuuaggaagcuucucuuaacauuuuucccccuccucauaucccaaaagaagugauuauauccucuucugugcuuccuccgugucucaaagauaacuuauuguuauacuuccucaguauuuauuuauuuauuuauuuauuuauuuauuuauuuauuuauuuaagacagagucuugcuuugucacccaggcuggagugcagcggugcgaacucggcucacugcaaccuccaccucccggguucaagugauucuccugccucagucucccgaguagcugggaccacaggugccugccaccaugcccggcuaaauuuuguguuuucaguaaagaccagguuuugccauguuggccagacuggucuugagcuccuggccucaggugauccgcccuccuuggcuucccaaagugcugggauuacaggcgugagccaccgcgcccagccuacuuccucaauauuauaauauauugcuauucaacugugucuggccuaacagacugucugcuccucuagaacagaaaccgucauauauauauauauauaucucccaaaucuaaagucaggcuugaaaucuaauaggcagcucaaaaacaauuuauucuuaaacagaauugaacaaugccuuaagguacaaaaguugugcauuauccacaaaauagcucgaauauuacugaaacuuuguugaaugguauuuucucugaagcacccauguugcuucaaaggacaugcuuuuguucuuauuuauggcuguguaauguucccuagcauauauguaccacauuuucuuuauccagucagccauuaauggacaucuagguugauugcaugccauugcuauugugaauagugcugcaaugaacauaugcgugcaugugucuuuuugguagaaugauuuauaguccuuuggauauauacccaguauugggauugcugggucaaaugguaguucuguuuucauuuauucugagaaaucuucaaacugccuuccacaguggcugaacuaauauccauucucaccaccaguguauaaguguucccuuuuccccacaaccuugccaacaucuguuauuuucugacuuuuuuuuuuucuuuuuuuucuuuuuuuuuuuuuugagauguaaucuuacucugucgcccaggcuggaauggagugcuguggagcgaucucggcucacuccaagcuccgccuccuggguucacgccauucuccugccucagccuccugaguagcugggacuacaggcgcccaccaccacacccggcuaauuuuuuguauuuuuaguagaaaugggguuucaccguguuagucaggauggucucgauauccugaccucgugauccgcccgccucaaccucccaaagugcugggauugcaggcgcgagucaccgcgccccgcccaugacuuuuuaaaaauugucauucugacuggugugagaugguaucucauugugguuuugauuuucauuucucuaaugauucaugauguugagcauuuuuucauaugcuuguuggucacguguauguauucuuuugagaacugucuuuuuaauucuuugcccauuuuuaaaugggguuguuuuucacuuguugauuuauguaaguuccuuauagauacuggauauuagaccuucaucauaugcaugguuugcaaauauuuucucccauucugcugguugucuguuuacucuauugauaguuuuguuuuuguugugcagaugcucuuuauuuuaauuaggucccacuugucuauuuuugguuuuguugcaauugcuuuuggagacuuugucaugaaaucuuugccaaggccuuaaucgagguauuucuuaguuuucuucuaggguuuagaguuuuaggucuuacauuuaagucuuuaauccaucuugaacugauuuuuguauauggugaaaggaagggguccaguuucaaucuucugcguaugguuagccaguuaucccagcacaguuuauuuaacagggagucuuuucugccuugcuugcuauuaucgauuguguucaagaucagaacgucguaugugugugacuuuauuucuggguucucucuucuguuucauuggucuaugugucuguuuuuuuuuuuuuuuaauuauacuuuaaguuuuaggguacaugugcacauugugcagguuaguuacauauguauacaugugccaugcuggugcgcugcacccacuaacucgucauccagcauuagguauaucucccaaugcuaucccuccccccuccccccaccccaccacaguccccagagugugauauuccccuuccuguguccaugugaucucauuguucaauucccaccuaugagugagaauaugcgguguuugguuuuuuguucuugcgauaguuuacagagaaugaugauuuccaauugcauccaugucccuacaaaggacaugaacucaucauuuuuuauggcugcauaguauuccauaguguauaugugccacauuuucuuaauccagucuaucauuguuggacauuuggguugguuccaagucuuugcuauugugaauaaugccgcaauaaacauacgugugcaugugucuuuauagcagcaugauuuauaguccuuuggguauauacccaguaaugggauggcugggucaaaugguauuucuaguucuagaucccugaggaaucgccacacugacuuccacaaugguugaacuaguuuacagucccaccaacaguguaaaaguguuccuauuucuccacauccucuccagcaccuguuguuuccugacuuuuuaaugauugccauucuaacuggugugagaugguaucucauugugguuuugauuugcauuucucugauggccagugaugaugagcauuuuuucauguguuuuuuggcugcauaaaugucuucuuuugagaagugucuguucauguccuuugcccacuuuuugaugggguuguuuuuuucuuguaaauuuguuugaguucauuguagauucuggauauuagcccuuugucagaugaguagguugugaaaauuuucucccauuuuguagguugccuguucacucugaugguaguucuuuugcugugcagaagcucuuuaguuuaauuagaucccauuugucaauuuugucuuuuguugccauugcuuuugguguuuuggacaugagguccuugcccaugccuauguccugaaugguaaugccuagguuuucuucuaggguuuuuaugguuuuaggucuaacguuuaaaucuuuaauccaucuugaauugauuuuuguauaagguguaaggaagggauccaguuucagcuuucuacauauggcuagccaguuuucccagcaccauuuauuaaauagggaauccuuuccccauugcuuguuuuucucagguuugucaaagaucagaugguuguagauauguggcguuauuucugagggcucuguucuguuccauugaucuauaucucuguuuugguaccaguaccaugcuguuuggguuacuguagccuuguaguauaguuugaagucagguagugugaugccuccagcuuuguucuuuuggcuuaggauugccuuggcgaugcgggcucuuuuuugguuccauaugaacuuuaaaguaguuuuuuccaauucugugaagaaaggcauugguagcuugauggggauggcauugaaucuguaaauuaccuugggcaguauggccauuuucacgauauugauucuucccacccaugagcauggaauguucuuccauuuguuuguauccucuuuuauuuccuugagcagugguuuguaguucuccuugaagagguccuucacaucccuuguaaguuggauuccuagguauuuuauucucuuugaagcaauugugaaugggaguucacucaugauuuggcucucuguuugucuguuguugguguauaagaaugcuugugauuuuuguacauugauuuuguauccugagacuuugcugaaguugcuuaucagcuuaaggagauuuugggcugagacaaugggguuuucuagauauacaaucaugucgucugcaaacagggacaauuugacuuccucuuuuccuaauugaauacccuuuauuuccuucuccugccuaauugcccuggccagaacuuccaacacuauguugaauaggaguggugagagagggcaucccugccuugugcccguuuucaaagggaaugcuuccaguuuuugcccauucaguaugauauuggcuguggguuugucauagauagcucuuauuauuuugagauacgucccaucaauaccuaauuuauugagaguuuuuagcaugaaggguuguugaauuuugucaaaggcuuuuucugcaucuauugagauaaucaugugguuuuugucuuuggcucuguuuauaugcuggauuacauuuauugauuugcguauauugaaccagccuugcaucccagggaugaagcccacuugauugugguggauaagcuguuuuugugccaguacuaugcuguuuugguuacuguagacuuguauuauaguuggguggugugaugccucagacauuguucuuuuuguuuaggauugcuuuggcuagucaggaucuuuuuggguuuuauaugaauuuucaaauaguuuuucuaauucugugaaaaaugacauugguaguuugauagaaauagcauugaaucuguaaauugcuuuggguggcauagucauuuuaacaauauuaauucuuccuacccaugagcauggaauguuuuucuauuugugugugccaucucugauuucuuucaucaguguuucauaauucuuguuguagagaucuuucaucucccugguuagcuguguuacuagguauuuuauacuuuucguggcuaucgugaaugagauugcauuauugacuuggcucucagcuuggauguuauugguguauggaaaugcuacugauuuuuguacauuaauuuuucauccugaaacuuuccugaaguuguuuauuugaucuaggagccuuugggaagagacugugggguuuuguuuucuagguauaaaaucauaucauuuucaaagagagauaguuugacuuccucucuucguauuuggaugccuuuuauuucuuucuccugccugguugcucuggcuaggacuuccagcauuauguugaguaggagugguaagagugagcacccuuguuucguuucaguucuuagggagaaugcuuucaucuuuugccuccucaguaugauguuggcugugaguugguuauagauggcucuuaugcuuuggccuaauuuguugaggguuuuuaacaugaagagauguugaauuuuauugaaagccuuuuccgcaucuuaauuaagaugaucaugugguuuuuuguuuuuaguucuguuuaugugaugaaucacaucuauugauauguauauguugaaccaaccuugcauccuaggaauaaagccuacuugaucaugguggauuagcuuuuuggaugugcugcuggguucaauuugcuaguauuuuguugaggauuuuugugucuauauucaucagggauguuagcuuaaaguuuucuuuuuucauugugucucugccagauuuugauagacagauagauauuucuugugaauuguuacaaaugcaagagaagaaaacuucauccaaacaaggcagauugcauacaaauauuucuacaaugaccucuauuuaucuagauaaaaguuuucuaauucuacaagacucuagaauacaacuucaaauagaggcuaggugugauagcucaugccuguaaucccagaaauuugggagaccaagguggaaggauugcuugaagcuaguaguucaagauccaccuaggcagcaaagugagacccugucccuacaaaauauuuuuaaaaauuagcuggucaggugauacacaucuguacuccaagcuacugaggaggcugaggaagggaucacuugagcccaguaguucaaggcugcagugagcuaugaucaugccacugcacgccagccugggugacagggcaagacccuauuuuuuuuuaauugaauacaaguaccuuugaacauaccaaauauaauuuuauaucucuuauuucaaagugaagucuagauaaucucacguauaagcauuuuuuuaaacauauagcagaucucuagagaugguguuuaucugauuuucaaacccuggcauuuagaaaaaacaaauuaauaaagacuaaaggaugagguaggcauugagauuucuagaacuauuaauagguuuccccuucuaggaaggaaggugaaaaaaguuucaaaaauagaaacgaaguguaaucacuguacauuuguaaauuguuaaaaaagaaaacauuggaaggccaaggcgggcagauugcuugagcucacgaguucaagaccagccugggugacaugguggaacccugugucuacuaaaauacaaaaaauuagccaggugugguggcaugcaccuguagucccagcuacuugggaggcuaagccaggagaauugcuugaaccugggagaguuagguugcagugagccgcgaucaugccacugcacuacagcccgggcaacagagccugaccccgucuccaaaaacacaaaaacaaaaacaaaaaaaacacacacaaagaagaaagaaguauauaguauuuuagauuuacaucacuaauggugaacacuuagaguguuuuguuaagucuagugguaaacuuuaugaaagggcaaauuuggaggucuagauuucagaaaagugauugaagaacuuuaggacuuucaucuuaacucaguaucuucaaauuucaauaaaaacaaaacaaaaacaacaaaaagucacacauauauuaaaauuaauagucaccuagaauagcauagaauaaaauuacuaugaccuugugaaaagaaauugucagaucaauguaauuuucuuuugaguugaagcaaaaugucauguugaucaagaaaaaaauaauggauaccacuuaucugugcuuuaagaagguauuugcauaucuauacauguauauguucuuauaaaaaacaugaucucucaggcugggcgcaguggcucacgccuguaaucccagcacuuugggaggccgagguggguggaucacgaggucaggaguucaagaccagccuggccaacauggugaaacccugucucuacuaaaaauacaaaaauuagcugggugugguggugggugccuguaaucccagcuacucgggaagcugaagcagagaauuguuugaaccagggaggcggagcuugcagugagccgaauucacaccacugcacuccagccugggcgacagagcgagacucuguaacaacaaccaaaaaaaaaagugauuuuucaucccugauuuccaacuuucauaucagaauuauggacuaccauaugaaugaaagaaauugaacuuucagugucaguugauaguaacaauagacauugacucucaaaagucuucuguggagucaauaacucuuugagagaauuugcauuuuauuaaauacuuacauuuguauaauuuaaaaagaauauagugugaauguuuguaagacauguauuuaacaugaauccaaaacuggagugggacauuaugaauucuugaaaacuuuagaauaaaucugggccuaauuuucugcaauuauucaucuguaucauauugcuuuuaggggaggguucaagugguucaagguaaguaaugaugauuuuaugacauccuggaaaaauauauuaauuaccauuuaucuaaauuaaucuaaagacuauuaccauuuaauaguuuuucaugcuggguauugacauuaaauauaaauuuuaagugaaacugauauuaauagcucugaggaauguauaaauaggaaacagaauaaccuugaaaccuuuaggaauuggcccaucaaggcaagugagacucuagugucaaguuugguuagcguguaguauauuuugaaccaagaacaaacuauacaaauaacaggauggcagagaagcuaauuagucacaaauuugguagaaccaauaaggcucuuuuauuuaacaggcaucguuguuucugauugauagcaggaagaacaggagaaucaugggaucaugggauauuuuuauauuuaaagaucaguuuuauuguuucaaucccccuuuguuaaaaugucaaacuggcuuguacaaugacaaaggcuaaauaaagguauuauauuacuaaaaaacuugacacaguaauucguacuaagggaaauguauacaaaaaucagacaucaucuuuuuacuguucuuaucaccauuauucuauuacaguuucuacccuaaggagauuagugaaguugggcagaaauuagaagggagcaaaagaggaauacaaauaauuauaucauaccuauggguuaaaauauugaaaauuuuucagcuuggaaaagagaaaacuaaagagagacauaauaacugccuucaauuguauggagguuugucacaaggaggguacguaauugaauuuuuaucccuauggaaagauaaaucauuuaaaauggguauaaacuguagcaauggggagcuuauuuguuuguuuucuauuuccaaaaauuauuugaucugacuuacaaaaucaaauacaauauaaagcagaauaauaaagaccaaaugaucuaaaaggaguggugaaauagauguugccaaauucagaaguguaacugcaauuuuuguuugauccugauuuuggcauuguguuuuuaacagcugaaggggaaggguaggagcacauggaggguuacauagauagaucccauagacuacacaggaaaggagcacacugcccaucucugauagcccuguacccucaagaguauaacugagcaucguugaaguuuaauagguccuuugguguuugguuguuugguugauugguauuuaaugaucuuuuguuguuguuaaauucuauucuacuccaugcguagcaacuaaauuauuagaagaugaaacugcuaguaagaugccaacugaauagaacuuucugguauuuuuaucauauccaacuuauuuucugcauuuggcccuacuuugaaacaucuaaaaugcuagauauuuuuauacuaagauucuuugaauuuuggagugcaacauucagaauguuauuccuuauuucugccaagagauuauauaaugacauauaaaacugugacuuuauguggaaaauaaauuugacucaauuuaauauucugggcacaacuuacuaucaacuacacuaaaacuuguucugucuggcagauauucucuggggucuaaauugaucauuuaaaaggacacuuucaaccacucaacucauuaaguggcucagugauucuguuugcaaguaguccauuccaacacgucuaucaguauacaauucucaaaauuagucguucuccaagggucauuccuuguuuucucauuuaauauuuaagguguaauaauaauggcuuucuuuuuuucuuaucagauguuuuauccauccuucauaacauagaucucugguaucccaacuugguauuuguccaaguacuugaaauaauguuaaagaucauuuuugugugugugugugugugaaagauuugaccgauaaggauucuuuuagcuauuuucaugaaaaaguggaaugacucaguuucucaaugugaaaacauauuggggucauaaguguuucuaaugaaauaucagucuugcugccugaauuucugguuuuaaaacaagagcauugaacugugaaagauuagacccggauuuaaaucucaaacuuccuccaaacugucugacaauggucaucacuuuauuaacuugugcuauuuaacuuugcugaaccuccauuuuuuucuuuuguuuuaaaacaaaaguuaagaacauguuauguucaguguuuuuacauugugcuuuugucagaacacuuguauucaaaacauaaaggcacauuuaagcggguauaaguaaaaugguuuauuuauuauaagaauucaggccaugcaugguggcucacgccuguaaucccagcacuuugggaggccgaggcggguggaucgugaggucaggagguugagaccauccuagcuaacacggugaaaccccaucucugcuaaaaauaaaaauaaaaaaauuagcugggcgugguggcaggcaacuguagucccagcuacucaggagguugaggcaggagaauggcgugaaccugggagguggagcuugcagugagcccagaucacgccacugcacuccagccugggcgacagagugagacuccaucucaaaggaaaaaaaaaaagaagaauucaacugaaaaucccauaggccaaaacccaaguaagccauaaagagauuaaacuggaaugagaaguccagaaacauaucaacacagccuacauucuuucugaaugcuugcauggcuacuguuauuucuguuuuuuuuuucugcuuuggccgauauccucugcuuggucauggccagacauagcuuccucauccucaacucuaggucaugcagugcaucuucucauaacauucugacucacucacucuuacuucauuuaaacaucacccagaaagcaaauucuauuguuucaguuaagccuauagaugagugccccgugaucagcguccucauaaaaccuaccaagcuguggccaugggaaaggggugaaagagucacaugguauaaacauaguuuauacuuucaguauggguuacauggaggacaauuucaaaaaaggagugagggcugaguuggcaccuaucauguguuauuauaaaaauuauucccauuuuauaaaugauagaauugaagcuaagcaaggccaagguacuauuuuaauaucacaguuuuguuaaggacuacaaccaaauuuugaaccugacuauucuuauucuaaguuuaaugaucuuaucacaaaacuuaccugguugagaaaauaaaucuccauguaagaaaugauuuuuuccuaccugagcaugguggcucaugccuuuaaucccagugacucccgaugcugaggcagaaggaucacuugaggccaggaguucaagacuagccuaggcaacauagcgagaccucaucuguacgaaacaauuaaaaauaaacccaaaagauaugaccuguucuaacauuuaaauuaauugaauuauggaugcaucuuuaaucaacaaaccaauaccugcaugaaucgacucagucccuuagguaccaaaagcuugcuuuuuuauauuuguaauggaugcuuuuccuagaccauucucuaaaacaguguuucucaaaauuugcccauucauuaacuaugagugcuacauccugaucaccuggacaagcaguuuaaacacagauucuagguccaccuuagaucucugaaacaaaaucuugaggugggaccuuggacuauguguuuucaaaaagaucuccacaugauuuuuaugaaugcaauggucuauauuuucaaaguguagucucuacuagauaaacagaaagcaauaugccauauuauuuaaguucuccacaaagacgccuucgcuuaauuaaaauuugguauuacauucuuggauuuuaaagaaaaaaauauuaucugaaugaagcucuaaacaguuguuuuauggcuacauguuuuaguuuccuuaguuugaugauaacacuuguguuagaaugagaugggugggaaggacagugacauuugcccuuccuauagcccgugcacugagcaggugaccuaggauaaggcauugaucaugaauucaguuauucauucauucaaaaaaaaauuacugagcacacuguggcaaacauuuugguuucuucaauauguugcauagaaugauuaugcauacaauucuaguggcguggggaaagaaacauuaagcacaagacguuuaguugauuucauuauugcacuaaaguauuugccuuuuucaaggcugaaguugacuucucugccuuccugagccauagggaaaagggucuugucuugcuuaugcagccagcaagauguaucgguuuaagaaaagugcugaguaaugccugcaaauauagcaggcagucagccucuucucugcagcuugguucauguccuuuacccaugcuauuuaaccccugauguuuuuauaucccuauuucuaaacucaaaaugaaccucaaacugaauaaggcauacaauaaauguauccauauuuucuuuauucaauucaguagcaucuaaaucccucuugugaggacccucugcuuuggucauuagauaguuaaaaagauuuaaaauugcuauaugucuaguuucuaaaaauugcuaaaugauuuucuaagguaaacaccuuuccguguauccagugcuuaacagaauuaauguuaugugaguuuucaaaaaaaagaaaggaaaaaaaggaaaucucuuuuuugucucagccgacagcaagcagugcugcuccggaaagaaaugauuuuauuucuagccucucugcagcaucucccuaccgcauuaguauguugcugcaaagcuauccauuguguaacuuuccccaucagucagucagcuguguaguucucuuuccuaugaaaucguuaugccacaggagacaaaaauaaaaauacaaugcagguuaguucauuauauccugacaucuguuucaugcagauugugaugcaauaaaauauuaguaauuuaaacagaauguaauugugguuugaaaucacuuggguaaaucguguuauuuuaaaacaaaucuuaggaaaaugaaauuuaaacuuugcacuauuugauuaggauuaacaaacaagaauaugaauaaaccaauagauauaaaauauuagacuuuaguacuuagaauauguuuuaagaguuugcuucuaguauaaguuuuaauuaacaauuauucauuagcugaaaauuuuugaggaccuauuaaguaccuaucacucuucuggguaccaugggaggugaaaaggggguuuaaaguuuguggcgaauguauaguaguuacauuuuaugagaaaaugucucauaccuagugacugguaaagacaauaaaggcuguagacccuggugacuagugaagaaccuauggccuggcuucugcuuaaagagagcucaauguugcaaaauuccuauuugcccuuucacuuuugcuagaaguguauugcaucacuuguaagauuaaagggaaaauauacuuauuuuguuucccaaaaguuuauagguuucugacuuucacaaaugcuuaagaguacucuucucuuuguuguuauggcuguccacguguagcaguuucaucuuuagaaguuuaaauucuuuucucuuucuugcuggauacaauggcucaugccugucaucccagcaauuugggaggcugaggcaagaggaucacuugaggccaggaguucaagaccaccugggcaacauagagagauacugccuguacgaaaguuuaaaaaucagcugggcaugcugguaugcaucccagcuacucaggagccugaggugugaguaucacucggggccagaaguuugaggcuacagugagccaugaucucaucacugcacuccagccugugugacagggcaauacccuauaucaaaaaaaaaaaaaaaaaaaaaaaaaaaaggaaagaaggaaggaaggaaggaagauaauuucuuugguuuguauaggaccuacggaguuaaagcgaagugauaaaauaaaggaggaguccuuaaugugcaaagaugcacuacucauauauuugaggauaaucuuacaucaauacuuuuaauaaugaaagaaaugugaaaauaugcuugccacugguuuuaacauuuaccaucauccauguuugaaaaauaaaacccaacacugguuccucucaugaguauuuaauuguucaagaaaaauccuagaaugagugaguuuuuucugucaguaccaccuuacacucucuacccccauuccaucuuuuuauauagucucuuccuggcacauugauaauucauuccaucagaaaauccccacuaaaaguaauucauccauauguauucuuccacugaaauuaacaggucccagccagccccauccccuaccuagucaaccaaaaaaagaacucuuacgcccucucucugauugauuaacccacuuugacagugagaaaugcauuuuacauugagaaguaaguagucucauugaugcauaaacgacucauguacucccagagauacuugucuuuuaaaaggaagcgcuugcuaacugaacugaaaaugcuaauuaauugaauuucaggaagcaggaaaauaauuuuuuuagcagagaagacuuucuucauauauagggcugcuacauuuggaaacuaaacauacaaacuguccaguuauauuugacuuucagauaaacaaugaauaauguuuacuagcagugggccccaaauauagacaaugagaacacauggacacagggaagggaauaucacacacuggggccuaucgaggggugggggccuaggggagggauaggagaaauacucaauguagaugacagguugaugggugcagcaaaccaccaaggcacguguauaccuauguaacaaaccugcaaguucugcacguguaucccagaacuuaaaguauaguaaauauaaaacaaauuguaugagguaugcuuaugcuuuaagaaaucaguuaucugaaauucaaauuuaacuguguggcauguauuuuuucuggcaacccuguucagauaucuuaaaucauuauggugguuacucauauccuccaugucauaaugcugaccuugggucucccuacuuccaaucugccaguccagccccuuuggacaucacuguuuccuuuacgcaacacucuaccuagagaacaacaacaguugucgcaacaaaucaaguacucuucuaggccaacuugguaacauucuaaaacaauaaugcccuaccuagcccacgggcuuugggacuuuacugggggugaauguaggguagcaggugagauauauuugggaauuuaaacaaaagaaaauauaauuugagcauaggcuuuagcugacuguaauaauaguauuuaaauuauuuauaagguuuuaacaaagcauauaauugaacaauuucagcugccaccugcuauugaggauaacaaaaaggaaaauuuucucagcacuuaagaaauguuagaaaacauauugauaugaaagaguagaaaugaauccaaaaaagcaugcauuuuuuucuuuagcaauuuuuguuuuaacuauaucuuuuuccaguucuucaucauugacaccugaaaauaggcauuggcaccacaaaaaugguuagauggagagaaugcaggacaugcauugaacuuuauauuccauugucuuacauguuuaucaacauucacuuugauguaccaaaacuaucuuuaaaugagaugcacauuuuaauguacaucuagauuagagaaaaaucacucuggucugauaacuuuaugggauugugaauacaagugaugugaugggugguugaccaauuauuuuaaaaaugguuuagugacaauucaagauuguguuguagcucauacccuuacacacacacacacacacacacacacacaaacacacagauugugggauugacagagauguucaguuuucaaagucaauguuucaguguucaaccuccauuuucuucuacucugggacuuaaaaaaaugaaucuguuaaaaucaggaauaccuaaauuuccaaguaaagauccaagaagacuaaagccuaaagucuauuucauaaaggagcuucuaaaaucaauuugguuacuuugcaggauucucaauauuauuauucucuauuugccaacuucauagucuccacaucucuaaccagugccuugcacauugucuauauucaauaaauauuaaagaaaugaacaaaauugacuguauagaccauguuucuuaguccauuuaguauugcuauaaaagaauaucugaggcuggguaauuuuuuuuuuuaaaaagagguuuacuugacuuaugguucuucagacuguacaagaagcauggcaccagaaucagcuucuauugagggccucaggugacuuccccucaugacagaaggcaagggcagccugugugggguagagaccacauggccagagaggaaacaagagacaggguggggugccaggcuuuuuuucugagauggaguuuugcucuuguugcccaggcuagagugcaauggcaugcucuuggcucaccgcaaccucucccucccagcuucccagguucaagcgauucuccugccucauccucccaaguagcugggauuauaggcaugcaccaccaugcccagcuaauuuuguguuuuuaguagagacaggguuucuccacguugguuagccuggucucaaacucccaaccucaggugauccacccaccucagccucccaaaguccugggauuacaggugugagccaccgugccaggcugcucuuuuuuuuuuuuuuucaaccaguucucaugagaacuaacagagcaaggacucacucguuacagugagaaugaggcaaaaaccauucaugagggauccacccaugacccaaacacuucccauuaggccccaccuccaacauuaggaaucaaauuucaacaugagauuugauggcgacaaaccauauccaaaguauagcaccaaguaucauacaccuagacagaaauagacuuggcucaaugucacaucugcugugacagaugugcuggacaucugguaguguccacucuauacaaaucugugauaaucaucagcugcugagcucucaaacaagacgaaacuguauaauaaucccuagagggucucuuuaacccagaccaguauaccacaaaaggaauauagugagaaugacugaauucacaugacagacugaaagcaaacuuaaguagacguuuauaugauuaucaccugaagaaugaugagguucauaaauuuggaaaggagagcuuuauuucuuauaaagggcugcagccugcagagugaccuucugacagguugggaagcauaacuuccagccagaagccagaaacagacacuucaagggagggaaaaaggaaacagaaauuuaugcuaagcacgguggccaaauauauauguucaauaaguuauaggaggagucaugaauauuuaugagaggagaagcaugcacauccucaacugagcuucaugccccuuugugggauccauguggaaaaaauggcgacauuagcaugauccgaggguagaguuuucggcccucugacauuaaaaggugaagcagaggacacaaaaauccuuacugcacauucucaguggaauggcuagaaucauucccuaguggguggucucuuaugaggcaccaauggagggaaagugucaggugguugguccaugucagugggggagucuuuugaaagggcugauuucuguuuagcccuuagggaagaaagccucauagugguuagugagggagggguuauaaggagguaugucugacucccugauccaccauggcugagaauucagucuucaagguuacucugggauccuuuuggccaggagaaggucaauucagucagggggcuuagaauuuuauuuucaguuuacaugauaaauuaagcauaauuuuauaucauaaaugauaaauaacauacagaaaauuuaauauacugaguuucugaaucaggaaauuaucucugccuuucaucuuucaagaccuauuuucuguaaguucuuucagcuuucucuauaccaaaaugguucuucucugaacaauaauccauaguaaccauugcagauaauaugccuuugcuuagacuuguucuaugucuagauuuuauauauacagaaucugaaccaaaugaauucugcagcucugauacuucuagucucaauuuuucauaacucagggagguuccauuugucuucagguuauuuggaaaagugaaagugucaaacaccugauacucauuccccaggguaguuaauuugugcucaacacucuccucuccccguuccuggaucuguuucucuuuccccugcaguuuuucucugcuucagccccgcugcccguggguucuaugcuguaucucuccauacagcaacuaugccuggacaguuuugcuuuguguugaggugguuucauaagaaugcuuuugagcagaagaguauuuuuaaauugaguuuaugcuaaagagaaaccccucugagcagaauuccacacagaauucugcaggauauuuccugcauaacaccauaaacauccuucuggcugcagcagcucaaguauuucuguugaaccauuucacacccugagcuaacuaacauucagagaaugaaaggugaaagucuuaaaacauaaauuaaauaacuaugauuucuuaauaacacuaaugacuaaacauuccacauagauccuaccaaaggaggguauuguaugucucccaggaacagagucuaaucauaccauuguugugcuggaacaccauugaguccaauagggauggcaucauggccaagagacuaaagaagagacuugaagccagcaagggagacauaggauuuaucuaggacucauauacaggggugguccaguggcagugggcuggaugggagaaccacuaauguuuguaaaaagcaugcaguuuauauagcauuuucacuuagcacucuccaccuagcaacauucauuuaauccaaacaaagggcuucauccacuguauggcccacauucugaggaauggaccaggcuuuggaaauccuuaauaauaaggagcaaauuuccagguuggccacuuccagccagauuucuuaccucagacuuccaaacacacauucuuuuuagaccacagagucauucucaggguacccuuaaauuauugcugucaggugcgucugccauacaaccaugaguccugaaaggauuugcacacugaaaacacugcauuauuuuaccaaaaugguuaucaaaguagauauuuccaaagaaggaauguaagcauccuuccucccaacccccaaccagcauuuuguguuaaaaugcuaguguuggcaucuuuuuccuucaaagggaauuguaccaagccugauuuuuucucccauuauugccccacagcaauaaaaagacaauugcugacucaggcacuauuuccucuggcugcuacuuauagcuacauaacuccuggcuuuaccagcaccauaggcaaaaaugaccugcauugucugagagagcagcaagaagaauggcauucauucugucuccaucuuuguggguuuacauuaaguuacuucuagaccaugguuuuugaaugaaauagaauggacuugaagugucuacaaaggagaggcacaguccagagugggaagggguggggagaggacagcaacggaagugagauggaggcugagcaaaaaaaaaaaaaaaaagaaaauugagaauaaaggagagcugggagagaaaagaugaacaucgagaaaggggaagaugaauagacuggccauuaggcuuucucuucgaguaauccacuuugugcaaaaccugccauauacaacuuggauauaggcagugccucucucauugcuagcuaaacagcccugggaggcccacacugggcuuuaagugccuaucaccucacacuugguaucucaaaaucugcaaccacaaucacagucacgaggauuagacuucacucucuacauccucccaaaucucugucgagugaccacucacccacacaauaagauuacuuauuuucuaacaggaaaacuuuacuaaaagagguuaacuuaaauaauuuacuuacaaugacagucauuacuauauucuugauauaaacuaaugacauuuguucaaaggaauucccuuaaauuauucugacuaugaucgucuagaagagauccuaaauuucacaugauuuauuaugugaacuauccauggucuuacucuuuaaugacaaucuucucuguaaggaaaaaaaugaaauuaaucauccuaaugauacugauguguuucaugagaaaacuacaggcagagccuaauaaacuauggcagaucugaaucucaggcaaaaacuauguacuguauuucuauguauuguauguagauugaaugaauuuuuugccugagaucugaaucucaggcaaaaacuauguauuguauuucuauguauuguauguagauugaaugaauuuuuuacuucuuaguuuauuauuagggugucuugaaaaacaccccuggaguauacaaauguagauacagacauauguuagauaucugaccuuauuuuaacugcaguuugcauaaggcaugaaaaacuaaggguagauaaugaaguuauuuuuaaauguaaaaguuuuaaacauauggcugaaauauguuguuuuaguuaaccccaaccuacuaaaaauuggcuuauugagaaaucaaaugaaauauuuuuguaauuauaauuacaccaaaucaaauuauuucuagaaaagaaauuuauaaaacaauacuuucuagguuugggauuucuauguaaaaaccaauuucuuucuuggcugcuaaaaaauaguuaugugagaucacaacaguaagaauaacauuuuaccuaguuauuuuuauuauuauuggcaguaacauucuuuuguaaaguagguggcaagaacacuacaaaacgaacugaaacacuucacaaauugucgugcccagaugguuuauguccccagaauaguaauagcucuuuacaaggagauggcaagcauuuuggcagaagucuuuuugguuucucuucaguauggauauuaaacuacuuuauagacagaauugaagauauauaauuuuucuccacaucagauuauauauuauaagguggugaagauauauaaauguugcacaacuauauugaacuuuggaguuacagauaaauuauauaaagucaucugcucaguuaguaacuagaaauaauccaguuuagcaauacauaaaacauaacggaaguaaaacauaaauugacgguggagguauaguucagcaggauuaaaaccugcaucauaugauucuaaacuugaauauuacaaucaucuuuuuaaauuuuggagucucccauuuuucaaaauuuugaagucuccauuuuugccagaaugcuuuauuuacuguauuuguuuugggucuguccaaguaauauaaauuccuuggagagaccuagaucaauuagaguagauaaauacuauuuuaacacagcuacuuauauuuucauauauuuuauuuagcuuuaaaagaauauuucauaacuauuaggaccuggcagacacugguuugggaguuagaaaauaaaaguucugauuuaagucccaccauuaauaagcugcguaaccugggacaaaugacauauuuauuuugaaaguaggaagcacauaaguucuaaacaaagaaauugcccauuuuucuuugauucaguuuguuuucuauuaaaugagaggaauagacuaaucucuguuuuuuaaaucuuugccauuuauugguuuugauuuacuuaucuuugucuaauucucuuaaaauaacuuacucaaccuuucagaaguccagaggucaagguaaacuaggucuugucugccugaaagccuguauuauagacuaacacuguuccacaucaacaacaaaauacuaucacauuaaguacuauauauauucuugucugugaauaaaccauaagagcugcacuuuauauucaguucacuaaucaauugguuaguaauuuuuuucccuguaaaucacuucuagggucagauaaggcaaaaaaauaauagcaauuauucuaauagaucauaacaauagcauuggaaacugggaggagaaaaugagagaauugucucaccagguuguagggagagacgggggagugaggagggggaauuucuuuuaggcuuuaaaaacaacauagaauuuaaggacauuauugaaccaaaaaaucucaagacauuaccuuaguuaugguauuucuugcauaaauacacaauggcaucagagugugaaguuguggaugcugggugucucucggggaugggaaacacuaaauuucauucaucuuucucagguucugaacaaagaaaaaauauucagaggacuaagacagauaucaccuuuuuaucucacagaaguuuguggagaguauagcuuugugugaaagcccaaaagcccguuaaccaaacagaucuaaccacagaggcccaagcagucacacagagcugcccuccaaaggaagaaacuacauaaugauuuacuuauaaaaggccaguuucuucggguacaaagcauuuauaagguugccuuuacaguuaagacuucugugugaaaugccacagggaaaaugaaauacuucauugugagcuaucguacauauuuguuugacuggagaaaagcagaugcccaagggaguuuaacuguaaggcuucauggguuaggauuacuuuaaauaaagcuccuccaucugcacuuugagggucaccaaagccauaugguuuaccacucccagucaccucaaguauaaacaucuuuuggcugugauaaaugccuccucaaguccagaacguaauacauguguccucuucuacgggaaacagagauauauaaugcccagaagcaaaaaccucaucuaguacuagaacauuuaugauaaguaaugaauuaguaaagucuuagaaaugacacugaauauuaucaguauuaacuuucugaucuuguaaagucucccgagaagguaaucuguuaauuauaaugcuacagauuuaccucccucuuuuucuuucaguuagauauuaccagaugauauuauaucuuuauuuauuauuuguauauucuaacaaauuuuuccuuauaauucuuuuguccacguuauuugauauuggucauguuauugcuauuacuuuacuauuucuuuccacucaaaauuuccacuucauuuucuuacaaucuuuuuuuucccccaugaucucucacuuccauuucauguucuuuuggauuauuuuuuuccugucuucuuuaggauugcuuaucuaauugaauuccacuuuuaauguauuuuucuugucuuccaaagaaucauucuucuuccaguuuucuauugcccacuacucuacuuauuuccaauauuuuuuaaaauuccuucagauuugaaguuugcuaacaugcacuuuguuacuuuuucuuccuagcuaugguuucuuaguucucuucuuaauuuuauuuuguccaaaugcauaaccauaaucaucuugaaaaggccucucucuuugaagucuucucuuguuaggaaaguuucauugucuuaccucuuuugaaaggagcaaggucuccucuauguaaccaaauauuuaaaugcugguuuuuaugaaaagagaaagcuguaagccaaaacugcagauucuaugagguuacuaccccguaucuagugacauguauuuucauaaauuaggacaauuaagucuucuguuauaaauuuuuagaauaaagaggugaaaucuccuuuguaaguguaaauggaaaauucaugauuuauuucuguauuuuaauagaauaaguacagauuucaaauguaauuuagaacaauuuuucauauuacuaaaaaauauuaauauugaaugacaucugacaguuuuuuagguauuucauaauuaaccuuaugagauuuuuaaugaguuuuauucuuauaauuaauauaacauaauuuauuuuuagguagcauuugaauagaagaucuacuuagaguuaaaaaaauacuuuuucuaguaucaguaugauuucauuauaauauggguuauauugcuuacauaugaauauaauuccuguaucuaacuaauuuauaauuauauauaauacguuugaacugaucauauuugucaguguagaauucaugucuucuacuuucuugguuguuuauuucuccaguaaaugauagcuagugaccagggagauuuucuuuagagagcuuuucucaaaugcaguauuucuggagaauaggaaggcuuuuaguaacuguuucuguccauucacacaacuucauggacaauaacaucaaguguggcacucugaaagacggugauugucguaaugaucacauauguuaaaauauaccuauauaugauaucuaaacauauacauauuaaggaaagugcuaaaacaguaaaaugaaaaggaugaaaccgaauugauggaaaaagacauacuagauaagugcaaauaaguagaaauuaaagucauuauaugcuaugagacaaaguugucuuuaaagggaagaaacuacaguaagauaaacaagggccauuuaaggaaguacaggguucaauucacuccaaagaucugaucauaaguguuaucuacacaucaaacaauaccgcauuggaauucauagaacaaaaaugacagaaaccacaauaaauaaaaacacauuaaauagacauuaauuugccucucccaacuuggaacagucaaguagaaaaaaaauauguacagacauagaaggucuacauaagauaagaaauaagaucaauauaauugaggcauaaugaacucuacugcuuuaaaauaaagaauaaguuucuuuuuaauguucuuagaaaagucauuuuaaaaacaaccucuauuaggauaaaaauaaaucacaauaaauuccaagaaacagaaaugguacgaacuacauuaucagagcauaggguaauaaaacuaaacauaaauuuaaaacuuagaaggaaaaucuaucauuugaaaaauuuaaacacuuucuuuuaaauaguucuugcaucagugaggacuuugaaaccaaaauucauuuuaagaauuuucugguuauucuuguuugcuuauuuuuccacaugaagucucaaauagauuucucuaguuauaugaauuuugugauuauuuuucaaaggcugcauuuaauuuauuaauuuagggaaaauuaauaucuuuaugauauagcauuccuaucuaauaauaggauauaacuuuccauccauuuauauuuacuuuugguuuauucaaagcuuuuaaaaaaugcuuacauuguauuuagaaacauuucuuccauuguacuuuuucucuuugaaauagacuaguuuuacaguaguuuuagauucacagcaaaauuaagccaaaaauauagaguuuccccuuucucuacacacgcagagccucccccaacuaucaauaucucgcaccagaguagcacauauguauuacuguaaaaauaaucuauuuagaagagaaaaaauacaauggaagaaaauuaauuuaggaaaaaaauuaauuuuuucccuaaauuaacaaauuaaacgcaguucaaauauaccuguauuguauauagguauauuuuaacauaugugcuauauuauauguauuagaaucaaaguccucuuugauucaagagcuauuuuagagacaguguuuagguauuguauauaguuacaacugaugaacccaauuugauauaucauaaucacccaaaguccauaguuuacauuauaauucaaucuugguauuguacauucuauggguuugcacaaauguauaaugacauguguccacuauuacagugucaugcaaaguauuuucacugcccuggcaaucacugaucuuuuuauugucucuguaguuuugucuuuuccauaaugucauauaguuggaaucauacuguauguccauuuuagauugcuucuuucaauuaguaauauguauuuaaaguuucuccaugucuuuucauggcuugauagcucauuuccuuuaaugcugaguaauauuccauugucuggauguaccacagguuauuuauccauucaccuacugaaggacaucuugguugcuuccagguuugggcaauuaugaauaaggcugcuguauacauccgugugcaggauuuuguguggacauaaguuuucaacuccuuugguuaaauccuaagguaugcaauugcuggaucauaugguaagaguauguuugguuuuuaagaaacugcuaaacugucuuccaaguugcuguaccauuuugcuugcccaccagcaaugaaugugagcuucuauugcuccauauccucaucagcauuuaauguuguuaguguucuggacuucgaccauucuaaugaggguguagugcuaucuuauuguuuuaauuugcauuucacuaaugacauaugauggauguggggcaucuucuucucauaugcuuauuugccaucugugugucuucuuuggugaagugucuguucaggucuuuggcccauuuuuuauucagauuguucauuuucuuauuguugagcuuuaauaauuuuuugcauguuugggguaacaguccuuuaucagacaugucuuuugcaaauauuuuucuuaguauguggcuugccuuccuauucucuugauaguaucuuucacagagcaaaauuuuucauuuuaaugauaucagauugucaauucuuuuuuuucauggaucgugccuuugguguuauaucuaaaaagucaucaccugaguucugguuccaaaauggcagugaagaagcaagcuggcacaauuccuccucaccaucacuccuagaaaaccaaaaacaaauauauagcacugagaauaucaccagaaauauuccagaacucaaauaugaagaugagacaguuccaagaaaaacagagaacuaaaaaguuaucaacaaauuuagucaacuagguuuucuccaauauuaucuucuaguaguuuuuuaguucugcauuuuacauuuagauuugugauccauuuugaauuauuuuuugugaaaggcauaaggucuagguucauuuuuuuuuuuugcauuuggaugucuaguuauuccagcaauacauguugaaaagacuaucuuuucuucauuuuauuaccuugcuucuuuauuacagaucaguuggcuguaauuaugugggccuucuuccacacucacuauccuauuccauugauccacuuaucuauucuuuugucaguaccacacuguauugauuacugcagcuuuacaguaagucuuaaaguuggguuagugucaguccuccaacuuuguucuucuucaacauuguguuggcucuuuuggguuuuuugccuuuccaaauaaacuucaaaaucaguuuaucaauauccacaaauaacugcugggauuuugacagaaauuaaauuaaaccuuuaguucaaguugggaagaacuagugucuuugauauauugaacacuccuauucaaagacauggacugucucugcauuuauuuaguuguucuuugaucucuaccucacuccauauagaaaauaaauuccaaauagauaaaauauuuaaacuuauaacauuaaaccaccaaaauacuaaaaauacaagagggaaaggugauacagaugcauguguguguauguauauauuuuauauccuuuuuccuaccccuuacugcccaucucucuggaugccuuucuaagcauuauacaguauccagaagccaaagaagaauuagauaaucaccuaacaauuuuaacauuuuuaauuaaaucuuuuaaaaucuguagcacaaagcaccauaaagucaaaaaauauacauuuuuaaaagaccacacaucaaaaaaucaaguggcuaauauuuugucuuaaaagaugcuauagauugaaaaaaauagaaggaaaaaaugggcuguuuuuaaauaagcaguugcaggaaagaaaauaaaaaauaauucuuaaguauaagaaaaauauauuccacuuuucucauaguaagacaaaugcaaauuaaaauuauaauaugcucucaucuuugucccugucagauuggaaauaucaaaaauaugauaacauauuauauuggugaggauaaauaggcacucuguuacauugcugucaggagaauaaguucauacaaacuccauagaaaguaguuuugcaguaacuaucauaaauaaacauucuguacaaagccaagucuaccuuuaaaaauuaauuuuauaaauauauccacauauauuugaaaguauguguguaaaaauguauuacuugcaacuuuauucaauauuagcuaaagauuggaaacaacccaaauacucacauucagggaauugguuaaauaaauuauggcacauaacaugcaauggaaacccauguagccaguaauagguacgagucaaaucuauaaaaauuaagauaaaugaacucuaauauacauuuuaaguaaaaaaugcugguguaaaacaguuuguauaauaagauuccauuugaauauguauuuuaaaauagaauauguauacauacacucauguucuagcauauaccuauugaauaccuggaaauauauaugggagauaaguaguaguaguugccucuaggaaggggaacugggccuggggaaacaagguaaaaaggagauauuauacugcauuuucuuuuagauauuugcauuuauaucauuuacauauauuuucuaucaaaaagcuauuuaaaaauaaaaacuauauauauacaucagaauauuuuauuucccuuuugagaaaaguuacuauauuuguuaucccuaaacuuuuauuugcaaaaaauaaauguuaguauuuuccugaugccuuguaggggaaccagaguuuguagacagaacauucaguuuucauugauuuacagacaaccuauucuugcagguacuaaauaacugcagguuaaguucuaagaaccgcugaaaacuucacuuaguagacuaaggguacaaauuuaaacuugaguccucccuucuuuugaucauccacucugaaaaauaugguuauaaaccucacaacaaugagaaccuccuugaaauuugaggucucugucccucacaaaauaauuaugccugcaauuuucuuauuguaguucauauacaccaaagcuauaauuaacuguaccauagcuugcugaccuuaaugaguuaaugcagucuccaaauaaaauucauggccaaguggcagcuuaggcucuggaauauuuuggcucaguaauaucugugaaaucugagcucauauuaaauaugccuuaaaacaauacauuugggauuuggcgucuggcaucagaucaggucugacucugcuguaugggguugacgguuuugccucaggccuucauaauaugguuagcacuauaggacuauagaaucagcaagaauuucauuauugcuucagugaagaaaaacacuuaguuucuauugaguuuauggcacccugacuucuuucugaucauuuuucuugaaacaggagacuccugcugucuccugcaccuacagcuaucuucuuccacccccaccuccaucuagcaauuucuuuacagccuaguuuuccucuccuucuuacucacauaaaugacauuuguccaaccguggacugucuuuaucuuuauguguucaaguaagccaaccaugcauggcuagugaagugagcaggacauaguuccaguugucucaaaucuuagaagagguuaaagcccagucaagacagcaauaacuauuugauuggucauuaagguuggucacugcaaacuauccugacuaucuuggccaggaaucacuugucagaccuagaggguuagauuuuauguccucucagagacaauuccuuuuccccucauccuuguuaaaugagcuauccuuugccuuuauacgcacagucuccaucuucugggugugucacagacugaauaacucauuagugauauaguguuaauuagccuaauguacuuugauuaaggccauauuugaaccacuuuuaaaacucauggcacaguuccuguaucaguaaagcacaagaauuaauaaauaagugaugcuuaacuaaacucaacacagaaaccauuuguguuaaaauuuuuucuuuagaaaucaccuuucaauuuaaggagaaaacagacuuuaaauccucuagcucauguuucaugacaagaauuuauuuauauuaacaucucuuaguccacucuuuaaaauaucuguauuccuuuuauuuuaggaauuucauaugcagaauaaaugguaauuaaaaugugcaggaugacaagauggagcaaacagugcuuguaccaccaggaccugacagcuucaacuucuucaccagagaaucucuugcggcuauugaaagacgcauugcagaagaaaaggcaaagaaucccaaaccagacaaaaaagaugacgacgaaaauggcccaaagccaaauagugacuuggaagcuggaaagaaccuuccauuuauuuauggagacauuccuccagagauggugucagagccccuggaggaccuggaccccuacuauaucaauaagaaagugaguguuuuuuaucaggcauauuuugcugcuaauugccuacugcauuccuuggacuguuguagcaccaacacaugccaaauuagcacaaaaucuuaaguauccuucuguuuaagaaaugaaacacauuugugggugguuuaugcauauacaugagaaaugaauugauuauaucauaacauaugcaacugucccaaaugcaccaugacaaauaaaaagaggccaggugcgguggcucaagccuguaaucccagcacuuugaggggccgaggcaggcagaucacgagguuaagagauugagaccauccuggccaacauggugaaaccccuucucugcuaaaauacaaaaaauuugcugggcgugguggcacacgcauguagucccagucacucaggaggcugaggcaggggaaucccuuguugaacccuggaggccgagguugcagugagccgagaugacgccacuacacuccagccuggagacagagcaagacugugucaaaaaaaaaaaaaaaaaaaagaaagaagagagggugggagggaaggaaggaaggaaggaaggaaggaaagaaagaggcagcuaauuuaacaaauugacagauucucuccacagauucgauuuacuauacaauuuuuuuguacuuucuguacuuggaaauacuuggaaaucucaaaaucaugaguuauaaagacuauacaaaauauuaguacuaauuuuucaugcaaacaaauuugaugccacaaggguuugcaauuucaaugucauguuauaaacaacaaaucaauuaauuuccugaagaaauuuuguuaccuguaaaauaacauuuuuacauaaacuagaauuuuacaaguuauuuaauauuuugguauuaauguacuaauauuggcaagaauuaacaaaaaugucauaaccugaagaaccuauaaacaauauuugaaugcgugcuuuuuucauauccaugcuugaaaugaaucuuauguuaagcauccaaccguucauuaugacugucauuucaccaaaccaaaacaaaaagcauaaaauuuuuuuuaagauuauugcauugauuuuaaauuaaauguaugacguuaggugauucguaacauuuucuucuuuaucacuugacacaaugcauuugugaaucuuaguggaaagguagggcacaaagauuguaauuaaguaaauuuuuuuguuggaccuggaccuuaaaauacccccuaaacuuuuagggacucuguuucuggcccaguucugugugaaguuaguccuugccaaaugcaugcaaaaguuuggcauuuguaauaugugaauuugaggcaguuuuauaaaucacuuccgauugacagcuacaguuucggaggaaagagcgucacaaaagguugacuagccuuagguucagauuuuuuuuuaacuuuucaggauauagucaguuuaaguauaacauauuuucccuuuuuuuuuuuucuuuuugagacgcagucucgcucuguggcccagacuggagugcaguggugccaucucggcucacugcaagccccaccucucggguucacgccauucuccugccucagucuccccaguagcugggacuacaggcgccugccaccacgcccggcuaauuuucuguaauuuuaguagagacgggguuucaccauguuagccaggauggacucgaucuccugaccucgugauccaccggccucggccucccaaagugcuaggauuacaggcgugagccacugcgcccggccaguauuuuccuuuuuuuuuuuuuuuaaacauuauacaacuuuaauguuacaccaucuacaaaucuaaauuacauuuaaaauuaucaguugacagugguacuaggauuuacuuuaggaaucacuacauauuuccccuuuuuaaaaacugaucuauucauuuuacaguagaggaagggauggaucauuuuccauguauuucauuuuccucuaacuuugcuuuugaacaccauauugucaaaucuuaguugauaagagauuauuaaucucauaacugccauuuaaguuaugagaaaaguugcacuuuauuauuuaaucaacucuuuggaaauuaauguaucugaaaagccaaagcccaaacuaaacaaacuacaaggacuuuauuuguauaagaaaaguaaaaaugcagauaauccaauugccuaaacauuuuaauucguuuaaaaugacuucgguauugaagugaagacugauguguuccaggcagaaauucauucacaguauagaguaugcuacuguauuuauagccauuggauacuuuuaguuuauucagaggcugcucuugggauauguuagugggcuccauccucaacaggccuuuugcuacccccagacaccggguccucaccucuuugguagcaaucaccaucuaaaaauuauuaaagccacccagcaucuaucccuuaaucaaacagggaagaaauuuaguaucucugcuccuaugcuggguccuuauuuguaaaauaauaaaugaauguuuugagaaagaccaaacuaaugcauguugacaaagguagacauucuucaucuggaaaccagaacaaccaaucaaucuuuuuuuucuuuaauuaaagagcuuucagacugauaaaagugauugucucgaggggaugucccuaaacaaaaugguccauaauugguuuauaaugaauuauauauagcaaaggauauaaagacagauguaaaacaaaauugugcaaacauuuucaaaauacucaaaagaaacaucuuaaaacugagggugaaaggccaacucugaugaagugacagccagauucuugugucgaggaaacccuuauaaacuuuguuaggcucacgucuaaacuugcucuuaacaucuucuguucuuaucuucaaaugcacaugguaugaggaaagaaaagcauuuuggcauuuuggagcaaaucacagugugcaaguagaacaaccugauaagggaaauauuguuaucaggaaagaguuuuccccaagguaagguauacucauggcuuuuacauugaacugacagcaagcaaaucuucaaauguaagucauucaacagcaaugcacacgaagcuuuuugcagggcugaaauccuuaaaaacuaacauggugugcuuagaacacaugauugaguuauguguuugaaauuuccuucuucugcauuuuuaugucuuaagacuuuuauaaguugccuguacacuuuuuucugccuuuaauuuucuuuucuaauuggauuauuucaguauugaaaaauauccuuaaauggaauuaauuugcucugacuaaaguuggaaugcuuagcaaaaucugaaccuuuuaaaaauaaugaauauuucuuucaauauucgaugacuaauuuuacuuuagugacuggguuaucugagauuggcugggugaucuucauuaaaacaaugcgguacacauacacaguacucuugacacagcuaaauggucaaacaguggaaaugucaccagggaaaauguuuauuaggacgagauuuuccacuaaugcugauacuggggguguggauuagauuugccugagugaaauggaauaugcaguuagacuagugauuucccuaaaguuggacucuaguacaauaguuaaugugucauuugcaucaguauacaaagacucugguuucuuucucaacuauauggaauagacaaaacaagccaauuguaaaaauauuugcagaauccauuccuuauguuauauuuuauguuaaagugcaguaguguacaugcaaggaauuuaugugaauagaaaaaacacaaccaccacacugaagcucucuguaaucuuuuacaaaggcagugucagugagcuuauuaaaaugucacugcugagaguauauuuuccaauggcauaugcccacauauuuuuauccucuuugucccaguuuaagaugugcaaauuauguaauguucaaauauucuacuaaaauuguuaaagcaguuuaauccauguucaguaauauuguaguaguaacuaaagaaauaguagcaucuaugcaucaugaacauuccugaugcauagaagcauuagaagguuuuuagauccucagauguuuuaagccuucagaguuccagguuaaaaacucaggggaaaaaaaugcuaucauaauauggugacaguauuuuucauaucauguuagcucugacucaguggucuuuagaacaugauuccagauugguuucccuuuguuuguuuauuuacuuuagcuguguagcaaggcacauuuuagcuugugaacacaccuuuuuuucccucacgggacuuuuuuucacaguuuccuuucauagcuugggcugauuuuguaccauuuggcccuacauucaaauucuuuacccacucuuuauuacagaaaaugucuuccuucucauguucuuguuaaaauuacagacgaaucauuauuaccauggaagaaaauaucauuuuaacaaugugacaguuuacuggaaauagaaugagacauuuuagaucuguaguaaaaauggauguuuguuaauuauggagugcagaaaugcauucauuuuuaaaaaguccuauggaucauuuaaaaguaacuuauucucucuugcuaucaacuguccugaaaagaugcacacucccuuuuucuugggcuccaugagaagucauauaugaauuugugauuucaaauucauguuuggucuaucacugccaaaggaguuuuuaguuguuaaauuggguggagagaguuuguuuuguuuuuaauuggaauuauggaguuuuucuugcaaaaguaauuaacgggaaaucagaaaagaggaugauuauuaaaagcuuauaauuucacgaauugucauaugggcaguccccaguguguagcuguucuuugcuuaucaucagcuccuguaaaacuaaaagucacccagacucucccuuacauccaggacccuguaguugacuucccaaucuuucucuucccuaugcacuauuucuuccuugugcuucuuuuuccuuugucaccucccugucucugucucagaaacagucccaagauggugauguugaucaauaaaaugaugcuuggcauuuuuagaguaucugccauaucuauaggagauccuucaacugaaaguuuccaaaacccaacagaaacaacuuuuggggaaaaauaaaggaaaugugucuagugaaucugguuuuaauaucaaaauacccaguaccucaaacaaugucaugaggguacuccuuuuccauggucagcucugcugucacccaugcuggcuucauuugcaggcuggcucuuccacaagauggcagaaauagccaccaguggugcuaaacuaacauccuacagccuuguaacuacuaucuucugcuaaaacaagaaagaagaaagaaaaaaggcccagguuuccuucaaaagcucuagcaguuguccuagaauugagucuaauuaggucacauggccuccucugaaccacucacuuuggcuagugguaugugauggucuccuugguaugggauggucucugucauauacuaaccuguguugccaaggggugggucagcuccaccaagccacaugggaagacaguggggcagagauuuacuccaaaaggaagagaagaggaacuguuagaaaagguguccuaagcaggcaaaaaaaaaaaaaaaagcuauguacucuacaugcuauauauaauaucaguauaauuacuguucuuuuuuaauccacagauucuuucaagauagcucuugucuuuauuuaaaaauaauaaaacugaguuuaaauaacuugccuaagacuaguuuuaaaacuagaccagugaguuuccauggcccauugccauguuaguuuggauuugcagucauagcacuaaucacagcaguggaaaaaaaaaaaagagaagucagugauggaaucuaaauaagccuauagcuguccuuccuguuuccuacucaugccauuuugcaagaugugauucuggucucccaggccggcaguauuucccgaacccuuacuggucauuucaacacuuggccauuuccugccuuuguaaaaccuuauuuauuuauuauuauuauucauuuuuaucaacaucaccaucuugggacuguuucugagacagagacagggaggugacaaaggaaaaacuaaaaucuuagacacucagugaucuagauuagcuucuaaaauaauuagaaauuuuuuuucccacuaaauuccaguagggugauaagcaccuauuuucaaagaggaucaauucaggaaauuuaaauugugugccucuauaaggaaauggcauuuaaauugggaucugaagguuaaaaaggaggagggagaggagaaucuuccaaggaaagagaacagcauagaauaagacauauaaucaagcugaccuguaauagguaagaagagaauaaggugagguuggggagguagaccuggggcuagauaaaggggaucuuucaguacaucuuaaagaguuugaagguuaucuucaaagcaaaaugaauucccaacaaguauuuagguacagcaguaacaugguccacuuuacauuguuaaaaaucacucaacuucucuauggagaaauuuaggaguuuuauacuugaucuagcauuuugacaauggagauggagaauaauggauagagucagaauugguuuuggagguguuuaggugucagacagaaggaagcugauggccucauuuucuuagauaggaaguuugagaagaaagauacugaaccugaaaauuccaauacuaaaauuggccaugcuuuggagaaacagaaauguucuuauauguguauauuuaagaguuagaauacagagacgcauuuuaaauauuuuaauccuuauauuuuuauugacacuuuagaauucacuaagggcauugacauguuuuauuucacuuuauccucaaaauaauccuaagauugguauuaguauaaucuucuccauugagauggagaaauugaggggaauaguuugcucauaguucucacacagcaagcuuguaaucaagcugggcucaaaaguguucuuuccagucaaagaaaaauuaacugaccauauaauaguguagcagacccaugguauguacauucugaugauauagggcugaaaaauguuucagcuccagauuuuauucuuuuuccuuguuguuauaauuucuucucucugcuggagaagagguugagggcucugcagccuuggcugacaaaagccuaccuaggcacuuucuagggaggcaccuucugcagaguuaucuccuccacuggccccaacccuccacccagcuaaagcauaggaacaagcaauuuuacagacucuucucuagguacaaauucuucucuuuugugugagcauauggcaacaauguuuaaaaacugacugugaggcauggaguccacagacauguuuuguuaaacuaacaaaauuauuuauaauuuugaauuauuuucuggcauuuauaaaucagaaaaucuuucacacacucauaaaauuauacaucuaaggauuccucuugaaauaugaguucaggcaucacugacuuauaugccuaaaacuggcagguaccuauugucacuuagccucugugggcauuuuaguuuguaaucuguggcuuaaggaccacaucugucauuaagugaaggcuauauauuaaagcuugguggcccacggguaggcaagugacacagauuguuguuuagucugguuaucacugguuggaaggaaaaaauugaaugagacuaggagaugaaaaaauauuaaauauggcauacucucuucagagucagguagaaagccugcaagaaaacuuuucaucccccagugagccagaaaaggaagaaaagcuuggcuugaacucacaggcuaugacaaaugagaagggaaguaggugagaccauuuaaaguccuuggggaaaaaauauuauauaccauggaauugacccagcauaagaaauguccccagagauauguauuauacuaauggaaucuccugaccaucuaugcugcucuucacacccaaaacuuugaagcaucucuccucuugcaacauggcucuaauucucccccuucaugcuggaaccucuuuccaagccagcagcuuagagcuaugaaaaacuuaauagcacuucuggguaggagcuagagccagauaauuuuccuggucugacuuccaggcuauuucaaggacagaacucugccauuuucagaguaacacuuucuuacacauagugauaaaguuucucagugccauucauucagaauuguacuucauuaacaguuugauagaccugugggucuagaaauauauguguaucugugagaauauauguucacauuuccaaacaauugacuuccaaaugcauuucuggagcacagcucauguacaaguuggaaauugccuguuucaaacuuugaagcuaaaggauaaauuuaaccaaccaguaguauauucuacauuuuguguauuguucaucaucauagcucaccuuccuguguuauuucuuguuuuugccaguagauuuacuuuaagaguaggaaagugcaauaaauuuggagucaguccuguuauuuggcaauguuucaauaauguuuagaugaaacacaaaguuacagcuuauguuuaaacuauguacuuugaagaauauggccccuagauugaaauaaauguuaagguaauggcuauauuuaaaugagaaaaagaaacuggaaaaccauggcuuguuaaauucaauguccauccugggaaaaaauuguaaacaaaucacuuucuauaagcccagaaacaagaaaagauuacuagauaauaacaaauauagcuucauaaauagcaauuucuaccaaaucauuauaacauaauuauuuucuuaguaacuauucaguuagaucaaggggcaagauuucaauccacauguacaacauaaucauugauaauuuggccaaugguuugugauuuuuuacaaccauuagguaacaaacauauuaacagcccugcuaugacagaaucaucuggauuacuuauuuaaaguauaaaaacuagguaucaaaaucugaccagcuaaauuggaaucacauuaccucuaugagcuaaguacauuuauucuguuuucaagugagauaacugagucacagaaaguuaagaaaccuguuccggaucacacugcuggaaggcagcaaaguuagcuuuugaaucagaaaucuaauuucagaguuugcacccuuaacauaagauaaaacaaaucauacuuauauuuucauaauguugcuucccagauuauuaaacuguuaauuaccaggguuauuaccaauuuuucuauauaacuuccuucuugcuuuuucuuuaaaaccagaaaugauuuuuacauggcaaggauugcugaagaagguaugagcuugcugaacaauggaugguuuaaguuuaggucugugcugcccaauauagcagagauuaauuagccuuguguagcuauugaguauuugaaauauguaaguguaacuccauauuucaaagaucuaagacuuaguauaaaaauauacauaucucaaaaauuuuuuauaucaauuucauucccaaaugauaauaauucagauauguuggguuaaagaaaauacuguuaaaauuaauuucaccugcuuuguuuuucuuuuaauguggcucucaggaaauuuaaaaucauaacuguagcucagauuuguagcuuacauuauauuucuguuggaaagugcuggucaagguaaccuucaucaauucuucuauauucuauuaaaacaaauaguugagcaucuccuaguuuauaaaugucuuggugucauaaccuauguaucuuuguuuucucuuuagaauguagcacagggcauugcaaauauuguacuaaacaguuaauacauguauucugaauugccaucaauugaaauuaacaauuggaccuaaacuaggucccugcucauacauaauuaccaacuuauuguauauaugcccaauaaacuugguaccuguauaugaagacauaagugacaagcuagaacaacccuauuguaugaauguuacauuccugcaaauaagucuguaaagugauuuuucauauauaaaaucuaguuguuaccucaguuacaaugccaugcuucaacauuuguuuugaagcagaaaauuauccacguguuaaaaugauguuauuaauuucaaacaguucuauuucuuuguagaacugcaauuaaagcauuuguuuuggcacuaaaaugaacugaaggacaaauauuaagaauagucauagaugugccugaauuguacuaaaccacaaagucuugcugcuuguaaguggagccagucaugucaauguuccuaugagccuugggugguaaaaagggguuuguuuugggcuagauacuacuguauaaaccuuuucuccuccaccaccaacuuugaacuguuucuuuuuuauucaaaugacuuaaugcaauaaaaguuauccugauaaguuguauuaaugaaaucuuuguugaacuaauuagauuuaaaggaugcuaagauacuucacuauaauaagcuaaccaauacauucuuuuaaaaaguuuuuaaaaagucacccaauuuaauaguucauaaaucuugauuagcuuaaagcuacacaauauuuguuuauacaguuuaagguacagcaauaucuuagcuagucuuugaacucuucccucuuggagcccuuucuuauacguauagcggggaaggcaaauauuuauauauuugaaaacucuagagcuacuuaaguauuuguuguaagcaaacaguauuuccuucagacucuucccucccuucaauaucaucaaugccacuuuugggagaaagcuguaucugagaguccuuggaaacaaguauccuuuuauuaauucuuaacacuuauaaacugaaugaucggcuucuuggcuauguaagcaauuacaaggagguaagauacagacaguugaggaaauaaacaaacauaagaucaauuacauauaauaagacugacauucuaaauggaacuuacucugacaugaaagugcuaucauauuuaaaauuauacauauuggguugcuauacaagucuggguacuguugcuuuauuggaaggcuguuuaaaauccaucaauaccuuaaagcuacaucuaugaaguuuguacauaagcauguauguuucaaucugagaaaaauggaguucucacagaagaaauccuaugaaaaaaugguccuuuaauguuggccuuauuguuagcuuccuggguagcaaggaugucuugcacaacaguaugucuuaugaaaaauuaaagcaaaacaaauaccguuguucaguaaaaaccuuaccaauuccauuuauaaauucaacuugcaaguauuuuccauugcacauauaaaucuuguuaccaaauaaucuucuacacauucuuuaaauuuuuaaaaugaauaaagggaauacacuguaaaaucaguaaauguuuucaucuaaggcuugaacaauugauaauuaugcccauuuguuuuuaacuuuugugucaaaguauuaauuuucucuaugucaaaggacuuuuagauuuagaaucacauaccaacauugagagugcuuugguuucauuaaacucaucuuacuuaguuucagcccuuuauaccuccuuuuaucuuauuuuuuaaauugacacguaauaauuguacauauuuaugaagcauauagugguuuuaauacauaugauguauagugaucagaucagaauaauuagcauauccgucaucucaaacauuuaucauuuuuuguguugggaacauucaauaucuuccuuccagcuauuugaaacuauauaauaaauuauuuuuaacuguagucauccuacagugguguggagagcuagaauguguuccuccuaucuaguuguaauuuuguguccuuuaacagauuucucucuguccccaccuuuccccgauuuuugucuagaauccucugcucuuuuuacuucuaggcagacuuccuuuuuggaaccuuuuguguuugguuucugaaucuugccucuuuuacuuuuuaguacucagggcagaaauauuuccccucccuucuuuuagaucucuagcuuugccuuuuacuuuaccacuccuugucugucuuuucuguuuuggucauuuauuaccucuggucaugguuugggcugaacaguggccaaggagccagcaucacagguguucucuucuaaguaugguccugucuccuuaggaugagccugguuauuuuccuuauccacggagguacaaacaguaccaucuugauuauccucacacuccagcccaugauuuaggccaucuauggauugucauuucuuucucauuaucucuuuguaucacuacuauuuguuucaaaauuagcuuuuaauauuaucugaaaucaagagauucuuauuuuaaaauauauauauucuguguuauauuuuuacugguucuccuaccugugccccuaauauuucuuuuucuuuuuuucagauggaguuuugcucucaucacccaggcuggagugcaguggcgcgaucuuggcucacugcaaccuccgccuccuggguucaagcgauucuccuguucuccugccucagccucccaagcaacugggauuacagggacccaccaccaggcccagcuaauuuuuuuguguguuuuuaguagagaugggguuucaccauguuggccaggcuggucucaaacuucugaccucaggugaugugcccacuuuggccucccaaagugcugggauuacagacgugagccacugcgacuggccaucugagccccuaauauuucuuucagauuuuacucagcauaucuggggggaaaggaaguauaugcaguacauuugaaagguggaccauauuuauuccugagcuagcucacuuugggccuuucugugucguuacaugcucauauucccccacagcaaaggcauuugcauugcacaagucuguucagauuuacgaugaucucacaaugucauucagggacagaaucccucaaugaaucagagaaaaagagggcuaaguauuguuggcauaggggauuguucuucuaguaagcacaggugaaauucucccuuccuucaaaugcgcuuugugguaaagcucuaucuguuuucuggacucauacuccuucaaagaugauagagggaaugcaggcagaggugagacuuggagcagugcuucucaaacucuguugaggaugugaggucucuauucuucuauaaaaugaaguaaaaauuaguuucuagaaaacugaaaugaaaaacaggcccacaacaacaucccccuacuuuuuuauuauuagaauagacagacacaacauuaauuggccaaauugccuuacaaauuucuaaacauggacucuccauaucuauacuuaaccaguacugguugggggaccauacuuucacagccaguuuaggacacuucuacccauaccagauagaaagugcuuaauuuucaaaaaccaacuccauuagcagguaggggugugggaggguggguuugcuuuacuugaauuuagaaaauccugcaaguauaggggaaaucuguuaaugagcuaagacuauacaaagauucuuaguagaaaauaaacauaacauuuaugcuugcuguaucauaacaugaucugugcagauaugcauccuaaggcuuagaaaagaaagcuuucgaagaaugggugaauuuaaaaucaagaagcuuaaaauuuccuuccccaaauaugcucuucacagagauaaaggcuuucucccuggcucugucuaaauauaaguaagcaccuuggaaaacauugagucagagcccuuuuuauacccuuacauguugcuucuuuaauguuuugucugcccacugccaauugaucucaaauaagucuaauuuuuggaaggaauuucauucacauucauggauccuggauucuucaggagcuuggagcuucuccucugugauaagaaagcacugcauaagauaggaagucaauugggauuagaauucaauaugucagcuaacucagaaaucccaguacagaauuuagcacuccuggucaacggguacucuccagggaucuuggccuccagaaaucaauuauuggauuacauccaucuaacccaagaguggguuugaugguggcuguuuuuauuuucuauuacgaagagagugauaauguuuauuuuaugaggauagaugguaaaaacaaucuuuauuucaaaaauaguaucaguucuguugaaugauuuugcguuccacaggauuaauuuucaagauauuugaauugggaaagcugaaaugacuauaaaaagcauguagugccuuaaguuuuuuggaaugaaaugaaaugugcacccauuuaagacuuucauuuaacucagacacuuaaaauaucgagaaaauaaaugacuucucuuggcuaauugucuuauguacaauaaaauugaggguaaguauuagguaaaagguaagugguaucauuggauuuccucucuaauuaagaagagauccagugacaguuuguuuucauggggcacuuuagaaauugugauugugcugguuucucauuuaacuuuacaauaauuuauuaugacaaguaacagaaaguagauaacagaguuuaagugguuuauacuuucauacuucuauguuguguuccugucuuacagacuuuuauaguauugaauaaagggaaggccaucuuccgguucagugccaccucugcccuguacauuuuaacucccuucaauccucuuaggaaaauagcuauuaagauuuugguacauucauauccuuuuucaagugauuaauauuaacuauuuguacaugaucuguaagcacuuuauagcuaaauaucaaauuaaguugggaaauguccauauuauauaguuuucaucacucucauuuugcaucuuugucauauuagccucauucuuaaaguucauuaaucacauagacauuacugaaacauguacucuuuaacauuuuauauauuauauauaaacauguauuuauguacuuuuguuaucuuucuaaaaacacuuauauguauugaauccuacaaaucuaaaguaagauaaccauguuuaccucuaccaucuuuauacaaaguuugugaugguguagaauuuucagugagcaaugauaugauaacagaaaaaucuacuuccagacucaaguuuauccauaguuaugauauaaaacacuucaguguaucuuagaauaaaccuuuaaguauauuuucugucagagaaugucaggagucuuuggccaguacuuaguuaauucuugaaauuuccugaugauuuuugugaaggaaguacuggaauauuggcugaauuucaaauucaagucaugaguuaugaugcugccaugcaaaacuguuugcuuaguaaagacuccggaaguuaaugagagaaguuggcauauauuuccaaauggucuuaagggauuugguuucaugauucccauugguguuaaaaaggacuccacgacuaaauucauuuguuaaucaauuuaggaaaacaauucacuucugauuguaucuuguuugauagcuuugacaauaauagauauuaaaauaccauuauaauuaucauaagcucauacuuuuuuuuaaaggauucuaaaauuugaacggccauucuaauuuuaauaugacagcaagaaauuucuuuagugguauaaauaugcuauuacuaaaauuaaaagauuugaaacauaaaaaucauaugauaggguuuuuauacuuagggaaguuuccuugucccaguuuguauuccuagcgccaucauguggucauuugaugaaaacuuucuuuuucaauuauggaaaauuuuuguuuuggcaguaaacuauaguggaaagaauauuggaucuuaauguaggaaacuuauauucuaguccuggacccuuuaucugauuccucuagagcuuaguaaggccuuauuucccugauuuuuaaaauauagugauaaacuaauuuuuagggucccuuucaguuuuauaauucuguuaugucuguucauuuguuuuagcuaccacuuagaguauauuuacuuacguaccgugacuguuccaagcauuuccaauacauuaacucauuuaaucugcauguagaaaugguuacauuacaaaaugaguacauuauuagcuccauuguagagaaguaggaagagauacaaggcaauggcacagagagguugagucucuuggccaacaucacuuugcuauguugaauuuuaauuacauucccaucauguuaagugucaaccuucaagaauauucacuuuuaauguuaucgaauccugcugcacuuguauaaacucagucaaaauagagcaacccaacaauuagcaucgugcuguacuuugacuacaaauuguuuucaugcguugaacuguguuggauaagauguguuuaagaaauuacaauauugcagauaaguggccuuccucaacaauuuacuaguuuauucaccugaaugagcucaagucaauacuuucugcugaaaaacugugcaacuccagguagcacaaaaauagucuucccacugaaguucucugggaggugaauauauugauuuaauaauaguuguaaaaacaacaccuuauacugauauaaugcuuucauauacauuaccucauuuaaucuauacaaauacucagugaaggugauauuauuacccacauuuuacacaugaagaaauugaaauguaaggagauuagaagacuugcccacaaugcauuuaucccugaauuuuggcuaagcugcaguuugggcuuuucaauguuagcuuuuuguaauauaacacuuggauuuugauuuucuuuuguguguuccuuaacaauaaccuacauuauucagcaugcuaauuaugugcacuauuuugacaaacuguguguuuaugacaaugaguaacccuccugauuggacaaagaauguagaguaaguucaacuuauauuuuuaauaacauauauacauuugggauuuugaaacugugucuuaauguagucuuaaaauaaaacugaagagcauuuuauuaaagucauuccuagacaaaauuacgcagcaagaggacaaugcucauuggcccucaggccugcuggcguuauacugauuaucacucucuuuugccuguaccugguguucaccugaagaccaccacucuuggacauuuaccccuuuuucuuuaaaaucuacaguagccaaaccaaauguggucaaagcaauugcagaaaagagccaauaugguagacauugguuccaguuaaauuccagauaaauacauugaaucaagaaucaaaaaggguuaguuacaaaugccaugugaagacaacauugaaccucgcaaaguuuucauuuccaucaggcacauucacuucaugucaggccaauauaguuccaagcguggucaccaacaaauugaaaaauaauccaaaguuucaggguuguagaacuugaaaauucaguagacugaagacuaaacuaacagaaguggaacuuuuuguagagcuuucagaaaccagaagcauuacuaacuauauugaugaucucucuguucuggggauaccuucgaagcacagaggccagauuugugauaacugaaguugggcuacucuaaccauagcugcucaccugcccacacuuccuauuuguaaugccuguuacuauacagcugcugacccauagcaacuacagaaguauuagguugguguaaacauaauugugguuuuugccauuaccuucaauugaagcuaauguuugcaccaaccuauuuccaagaguguccaccaacauuugcaccaaccuauuuccaagagugucuccuuuccuagacacuuccaggcugaaaccaauaagaaacaugacaucuugaagaaaauaauaaauuuuauauacaaaaaaauucuaaaguauugaagcuaauaugggaggccccacagguuuucagucgcccuaguuuucuugugauuuuaugccacucucacaccccaauuucugaguagaagauuuaaacuuuggaaacaccuaaguuucugaauuaucagaagaauuuuauucuaaauuaaauuuuuacuucuuauaacccuagaaguauuuacuuugauuuuaaagaaguccuuguuccaagcaaguuaaauuaucuuguagaaaaaaaaaaacacgugcuaauuugucaguuuccucucauucuuagaacacuauuaaacuugagauuuuuuucccuaaaagaaaaucauuucaugcuucugcaauauuauugauuggcuauuccaucauguaaacauacuaaauauuucucaggagacuauauuuacauaaauaccaagacauuucagacaauggcuaaauagauuucauauaccuuguauuucucacacuacucuuaagacacuuuacgaaacaacucuuuguguuaggaagcugaauuuaaauuuagggcuacguuucauuuguaugaaauuaaaauccaucugcuuaguuuucuuuuuuaguauuuaucuauuccacugauggagugauaagaaauugguaugcuaugaaaaaacacuguuacuuuaucaaauuuuuuggaugcuuguuuucagauacaccuucacaggaauauauacuuuugaaucacuuauaaaaauuauugcaaggggauucuguuuagaagauuuuacuuuccuucgggauccauggaacuggcucgauuucacugucauuacauuugcguaagugccuuuuuugaaacuuuaagagagaacauaguuugguuuuccaucagugcuuaugcuuuuaagaauagguuugcuuuaccuguagaauauuuuggugugauuuauacauucaaacucuggauuucaauuuagcacaacaaaggucuaaguggaauuucacuauagcaugaaggcuuugcaguaguugaaaacuacaauuuucacacguagcaucagucagaaaauuucacauaugccacucuuccacacacacaugcacaaacacacacacauaugaacacacacaaucuaaugucaaaacacaagcauauuuguaauacaucugugaaaauaacuuuaaaaauuacagccacaaaacaguucuauuggcuacacaaauuugcaaugaccuugcugauauuacacacagcuucuuuuauugguuugguaaaauaauugaaaguaaguaucuacuagcaucaaaacgaucugacaaaucaaacuaagagaagaaagaagauacuugaaauauuauguuuuuaauauauuaaauuacugauuucuaagaccuguagaggaauacauucucucugccucuuucuguuucucuccugaccccuuuucuuucuucuuuucuucuuuccuuuuauggcucucuucaucucuuuagucugaacauaaacuuccuuauccuuaucuccuauucauauccacucaguaauaugcacaguuuaugcaccccaaugcuuuuuuuucuaguggcaaacuuccucaggaagagacccagaaaaauaauagaaaaccauuccagacuaagugaaaguagaguguagaaggaggcagcccaacaacacuuacccucauccuuccuucaggagcugauuuuuuggccucuaacaguugugauguaguggauaggagcaggagagguggcacugauacacucaggacuccgaaugucuggucuuaauuuccuaucugaucaggaugagccaauucuuugcuaggcucucuggucacagcucaaaagaaggccuacaggacuucuauuucuuaagaacaaaauggcaguaacaauaggcgcagcauuggacccucaucaaguauuguucuuaauuugcuuaacuuuuauuuaaaaguuacacuaggaaaaucuuaucucauauauaaaagcaguaaggcaaacugccuuuucaugccuaaauuucuguugggugauuucauauauuuuuuucuaacuaaaacccuaaaccauagccaagauuuacuuucuuuuuacaaguuacacaugauguugguugcauugcuuuccagagugacaacaagggugucuacuuuaugaaguuuacauuuagcuaauggccuuaaauuaugugaacaaagauuaaugauggaaucuaauuccugauuuaccacuuauaauauuuaucauuuaaaaucaccaagaaggucuuuauaaaagacccaugcaaguaauauaaauccugcuaaaaucuugaauaauucugauuuaauucuacagguuuguaacagaauuuguaaaccuaggcaauuuuucagcucuucgcacuuucagagucuugagagcuuugaaaacuauuucgguaauuccagguaagaagugauuagaguaaaggauaggcucuuuguaccuacagcuuuuucuuuguguccuguuuuuguguuugugugugaacucccuauuacagguacgucacagaguuuguggaccugggcaaugucucggcauugagaacauucagaguucuccgagcauugaagacgauuucagucauuccaggugagagcaagguuagauaaugagacggacccaucaugugauucagcauccuucucugcuugacauucaguuuuacagaaaaucaggaaucauaagacuagguguuucaaagaaaaugauucuuauuguuuagacauaagcuuuaucagccuuggaguuuaacaaugucuuaugugagauacuguaauuugaggucaaggugaccugcacuuacaaauaucauggguuuuuuuuuuuuucaccauguuaguuuuaucgagaauuugcucccuuuuaaauguaccaaucuguaauuucuuauucauuagagucauuaaugacuauguguauacaaugcaaaucuucuaaguuuuuugcuaacaaaagagaagggaauaagacaauaaagaauagugugagucugcauggaggauuuauuaucuuaaggcacaauuauacugcagaccauuuucgguuguacagcaaaaucuuuccuacuuauaaauaggaauuuuaaaauauuuauucagguauuuuguuauaaaacugaccucugacccuaaugaaaauaugagacaaguuucaguagcaaaaaggaaaaagacaaggcccuuuccuuaauauaggcuccaugaagaacaugaaccuuccauuacucuaucucgacauaaugggauaugaaucuucauuucauuguuuaaaucauuacauuucuggaguuuaucuucauaaguucuuccccuucaaugaaguguugcuucuccacuagcguugcaaacauucuuggauuuaugaaugaaaucuauguuuucaagaaaauugugugaagcuuuuauuauuucacacguguuaagucuucauaguaauagacuucuuucuuucaggccugaaaaccauugugggagcccugauccagucugugaagaagcucucagauguaaugauccugacuguguucugucugagcguauuugcucuaauugggcugcagcuguucaugggcaaccugaggaauaaauguauacaauggccucccaccaaugcuuccuuggaggaacauaguauagaaaagaauauaacugugaauuauaaugguacacuuauaaaugaaacugucuuugaguuugacuggaagucauauauucaagauucaaguaagaauuauuguuauguacauuuccuuaaaaaguagaauuggauuguuuguaacacaaaggauaaauacuugaggggcuggauaucccauuuuacaugaugugauuagcacacauugcaggccuguaucaaaacaucucauguaccccauauauagaaacaccuaccauguacccacaaaaauuaaaauuuaaaauuuaaaacuaaugaaauaaauaaaacacccucuaaaaaagaauuacuaucauguauauuuggucuuuucauugcuaaugugccuuccaucuaggaaugaaaaauauuuuuaaaugauuacauaacaagacgugaucuuuuagaaaauuaccuaaucaaacuauuuaacaauauuuaaaauuauauuuuauuugguauuucuacccccuggauuuuaaauaauagauuauuuauauuucuggaacuaaaagaagaauuuuguuaaucaccuuaucaauggcuuccacauacauuuaacaacuuuguucauaacuacucuaguuuugacuccuaaaugccacuuucuauuuuaucaucauuuggaaggcugaagaauucagcuagaaagaauuuuccuaggauccuugguugcuauacauucuuccuguggugauugauauaaugaaaggagauaaaauaugugaaugcccuuugcgaauucuacaauacuaugcaaauguaacucauuauacauuaauuacacaaugucuuuaauguaucagaaacuguauaguacacuggggaaaauaauggagguaaugcauggcuucagaguguuauaguuuaauagauuauuuuauuaccuuaaggaaauaaagugauaccuaaaaguaaaucuuauucuuauauuuaaaaaguaguauuacauuaaaaagaagaaaauuacaguuaauaaagcuucaggagacaguaauagaaaauguuaguugggugcaguggcucacaccuauaauccuagcacuuugggaggcugaggcuggaggaucacuugaggccaggaguuugagaccagugugggcaacauagugagaccccuucucuacaaaaaaaaaauauauacacacauauauauauauauauauauauauacuuuuuuuaaugaguugggugugguggcaucuucccaucucagccuccuuaguagcuggugauacgaaugccaguagguccacuucaaucaccagcucccugaaaucuguuguuuguuuguuuuaucuaaguucaaaauacugacuaugaggguuauuuaggguuuauucucucuagggaaaauuuauuggacugcauuuuuccaauacucgaaguaaaauaauaucugaggucauuuucagcucuaaacaucuaugguucuuauuuuaaaccaaaugcaaauauaaauaaaaugguucauuucugaaaauaauagaaaauuaaauuuauuaaaauuaaagguaacuauuauaacugaaaaauuauauuuuccucagguuaaggcugaucauuaagguuagaucauugaauuuaaugggcaaaacuucauuuauaaauaugagauaucaaaaauucauccagaaacuauuauaguccuuucucuuuguuuaauuuuaauugaaaguuaggaaauacuaugucaacuuuccugucuagguucaaggaagucagaauauuagaaauaaaaaugauauuuuuccuuaugugcuucuguguccuguacagaacuauguauggaauaaauuccucagaaaacuuagcaucuagaaaauauaucuucuuacaaaauccaacauugauuguuuaauuccauguuuuucucuuuuugucuuuuauuuacuuauucauucaauaaacuuuacagaaaggcuacccggucucaaacaaacacuaauauagaaauaauuaaugauugggacuuucuaggaggaauauuuguaaauaaauaauuacaauauaguagugucauccuaagaauaauucaaguauauacagguuacugguagcacagugaggggaguucuuaauuaugucaauauuuaguagaaagaaaguugaaaauaccaaggaaaaaguuauagaagaacuggacauugcaagaagccaaggaguuugcaagaaacaggaaucuuugagauaauguaguguucaccuauagucauuauuuuagcuuuaguauuuaagacuuuuuaaaauugcuuucauuucaguuguugauaugauuuaugcauauuuuacuauaaguugccuauauucugcaaaaugugagaauauguuauacuuaauuauuaaaauguauaguguuaaaaauauaggcgagaggaccagaaaauauacuauucuuuuauuuugaaauauguggcuguuuugcaaaaacaaagaaauuccugucauuccugucuauuuuuacugaaugaauuuuuuucgugagaauggugaacaaaugcuaauaccuuuuugaaagauuauguuaguaccugucauuaucacuaacuuuacauucauaaugaagaaauacuuugcacuguaaagugucuaaaguaucuuugcacuguaucuaaucuaaugucauuucuucauaaugaagaaauacuuugcacuguaaaguaucuaauagaauaucuagaauuuagagggagaagagacaaauacuugugccuuugaaugaauaauauauuuaaaauuacucaauaaacuuaaaaguagaaccugaccuuccuguucucauuugaguguuuuuaacaaugcaaauguucaucauacgacuuucuuuuuucaaacaggauaucauuauuuccuggaggguuuuuuagaugcacuacuauguggaaauagcucugaugcaggguaagucaauaauuuguguguaucuguguauauuuguauguacacauacauauguguaucuuuucucucuuuuuauagaaacugaagauaacagccaacuaauuuuauugacauuaauuugcuauauguaagguuuuugauaaaguaugagauuauguaaauauuagguaagauuuauguuuucuaaaacaagaaguaauacuuuuagacacaugcacacguauguucauugcagcacuauucacaauagcaaagacauggaaucaaccuaaauguccaucaaugauaggcuggauaaagaaaaugugguacauauacaucaugggauacuaugcagccauaaaaaauaacuagaucauguccuuugcagggauauggauagaacuggaggcuauuauccuuagcaaacuauugcaggaacagaaaacuaaguaccgcauguccucacuuauaagugggagcuaaaugaugagaacacauggacacauauagggaacaacacacacuagggccuaccagagugugcaaggugggaagagggagaggaucaggaaaaauaacuaguggguacuaggcuuaauaccucagugaugaaauaaucuacacaacaaacccucaugacacacauuuaccuauauaacaaaccuguacauguacguaccccugaacuucaaauaaaaguauaaaaaaagagaaaaauaucuauuaaacaccuacuguauauaacagcaaacauacaaaaagaggaguaauccuguuccuacuuuuuuaggaguauauaauaauaacaauguuguucuuuuagauaaguauauugagcuauaaacucuggagacuccauaguaguaaaaaugaaauggagguguugaaaaugcaaauuaucaacaaaaauuauuuuguaaaauauuauuagaaaugcugcaccauauuuuaaugaugacaccaaguagcuaauaagacuauaugcagucaaaaguugggaaauagauuaguuacuuauuugucaaacuuuuauuuugaaauaccaaaucuuucugacuaggcaauaucauagcauaguaucagaguaaaaaggcagcagaacgacuuguaauacuuucuuuuaccccacuugcagccaauguccagagggauauaugugugugaaagcugguagaaaucccaauuauggcuacacaagcuuugauaccuucaguugggcuuuuuuguccuuguuucgacuaaugacucaggacuucugggaaaaucuuuaucaacuggugagaacuaaagagccacacucuccauuuaaguaaaaguauacaagaaaaccaauugaguuaugaaauuaaaaccggaugauaauauaguagaaagagcagaacuugaaacgagacuugaguuccucuauccuauugauuauaacacauacugagcagagugaugccaaggauugcaauucucucccauuucuucuuggcucaaaaccuguucccuacccuucucagacacagauuguccuaaacagaaggcacauucucccuucagcccuaucuacccccucaaauauuaucccucaggugggaaguaaugaaaaugaaaaagcagauauagaaagauaacuuuggucuguuccuugacuuuccuaaaggcucaggucguuaauggaggacuccauggcauuuuauugacuguuucauucuuggugaauacaaaaauucugccauagaaaucauagugugaaugcauaagcuagaagagaaggaagaagcugaaguuaaagaaacaauaaaaaaaaaguacagggugcuaugaccaacauaauuacuauuuauaucugaguuuugcuagacacaugaguaaauugaaaguugaagccaccacuuagugaaauaauauugagaaauaauucugauauuuuuguuugcagacauuacgugcugcugggaaaacguacaugauauuuuuuguauuggucauuuucuugggcucauucuaccuaauaaauuugauccuggcugugguggccauggccuacgaggaacagaaucaggccaccuuggaagaagcagaacagaaagaggccgaauuucagcagaugauugaacagcuuaaaaagcaacaggaggcagcucagguaaagcugcccugucucauggcacugaccuuuuaucguucugauuguuacguaauauugaagagaaagugaguaccuaagagcaggugguuguaugaggaauuaauaaugauuucuauauuuugaugauccacuuacuuuuauuuaguuuaauuauuuuauuugagauguguauaauaauaaccacaauagaacucucucaugcuauuuuaaucaucuuaagauucucaaaguaaagggaaaauguuauuuugggguauuuucaagugagagacuuuuauucaaugaguagacuggcauuaggaggaaaucaucuuuucuuagaacaagaaauuauugguuaucauaugaagaguugcuccucuaguucuuaaacauagucuccuuuuuucuuuaacuaaaaauauguuggcuuuuaacgugguugcuuuauuaccuuuauaaggaagugaucaaauaauauaaugaucucugauacagcagcauccaauagacauaugaauguuaccaaucuuacacagauugaccaucuaaaaaggauuacuuguuuuuauagugaaguguuaguccucacagugugauaaaucauaaaaugccucuccuaucucucucaucuuucuguuuagcauacaaacuuauugucuuuacuaaagaagaaaguuguuucagaaauauuaauuuauaugcaagaguaauuaauuuaucgagguuacccugggaacaaugauaauaauaaaaaagugucaacuuaguaccaguacaagcuauaaucaaaaagcauuguuuuauuccaugcccaugugccccuuaagaaccaguacugauuugaagaugguggggacaguuuuuggagaacuggaugucuuaucuugcucagcagaaacuauugauucucccuuccccauucuucuggauauuguggaugggugagaaagggauuuuauaacuguccauaaauaggauuaauaauauuuugaggguauuggacaauccaauuucaauaacuagagaaaggaccucagguccuuaucccauuccccugccuuaaacucaucagcuuuucuuccauacucgaguuucuuuuucggagaaaagaaaacaacacuaauuaaauaccaauuuuuaaaguaaaucaaaucccaaaaaguaaugaauuuauuuucuuguugauacauguuggauauuuuugaauacguggucuguggagcauuaacagagacauaauaaauguuaccauggagcaaacuaaauuaucuccaaaagccuucauuagguagaaagaaaaaaaaaaucuccucuuauacuugcagagaaucuucucugugagaugaucuucagucaguucaauauauuuuuuaaaagccaugcaaauacuucagcccuuucaaagaaagauacagucucuucaggugcuauguuaaaaucauuucucuucaauauagcaggcagcaacggcaacugccucagaacauuccagagagcccagugcagcaggcaggcucucagacagcucaucugaagccucuaaguugaguuccaagagugcuaaggaaagaagaaaucggaggaagaaaagaaaacagaaagagcagucugguggggaagagaaagaugaggaugaauuccaaaaaucugaaucugaggacagcaucaggaggaaagguuuucgcuucuccauugaagggaaccgauugacauaugaaaagagguacuccuccccacaccagguauggcacugcugaguuuacugaugcaugguugaaaauuaaaacaugggagagagggggagaauuagaaaauggacucaggaauuuuuaucaacugaaucaaccacuguuguguuauauuuaaacccaucccuucuucacauaguuaugcaaaaacuuuacuccacagauauguaagucuacagcucgguguaguuaagauaacaccaaguugacagucaggagaacuggacugucauucugauacugucugcugauauuugucuauaacuaaugacauuuaaucuuuuugauccucagcacuuuuaagaaaaaaaaaaauguggaacuccggauagucgaucaggaauguccuuagguuauuuuaugauuuuauguuuuuuuucccccuaacuucuuuauaagucaccaugcaugcuucugaaaauauuagucaugguacacuugaucaaaaggcacaugacucugaauuucagaaguaugaacuucaaguuccaacaauacaaugccuuauaggugaaaaagaaauaauaauuaaagugauuuuagaaagguggacuaaaguaaauugugaggaguguugaaaguuuuugaaagacaagauccauaaaaaccaagguggccuuguuaaggucauggugccaguguucacugaauguuuaccacguccauugccauauucuaaggauguuucccuuugaacuugagaaauggucguucaggguguguguguauguguguguguguguguuucaauauguuaagguugcaaucuaucuccucauucuuuaaucccaagggcuagaaacuuucuuuuaucaagguaauuuaauuuaaugugaaugcacauaaaaugagaaugauaaucaaaaggaaugaaccauauucuguuaugaaugcugaaaucuccuucuacauaaucuugcaaaaugaaaucacauucaaauguccauauuaauaugacuuuauuuguuugcucuuucaaacuucuagucuuuguugagcauccguggcucccuauuuucaccaaggcgaaauagcagaacaagccuuuucagcuuuagagggcgagcaaaggaugugggaucugagaacgacuucgcagaugaugagcacagcaccuuugaggauaacgagagccguagagauuccuuguuugugccccgacgacacggagagagacgcaacagcaaccugagucagaccaguaggucaucccggaugcuggcaguguuuccagcgaaugggaagaugcacagcacuguggauugcaauggugugguuuccuugguugguggaccuucaguuccuacaucgccuguuggacagcuucugccagaggugauaauagauaagccagcuacugaugacaauguaaggaaguuuuaaauaguucaggcauggcuggcucacuauugcugcaccagccaguguuucuacagaacggcaaccuugagaaugauuccugguuggucacgcugugaaugcaccugcaucuuguaauaucuuuaauagacuaaccaacuaaaacuuaaaaccuuagcagucuccugcacaaaccugaaugcauuuacuuauuaaaagugcuaaggauugauuagacacaauaauuacugccuccaguuggaggauuugcuauauacccacacugaauuuagauagcaggacauucuccaaggcucugguaugaaaguaaaugaaugauucuauguuuaagugucaaggguauguaauaaaucuuuccaauggauucuucaagaucucugcuuuaguuuagauuuucaaaaacacugcuuaaguagauagcuucauuguuaccuuaauacuccuaguacucauauuuuucuuacuaaaaaaugcugauauaggucuucucaaaauuaaaugaagagacacaaauacauuauuaauacagacagauaaaauaauugucuguguacaaagguauguuauguguuuguggauguauacucagaugaggaauuucuaaacagaugcugccucuucuuagacuguuuacucacuuggaaauauaucagcaugaggaggcaugacuaagucagaauuagaugacuuauugcuuugguacccuggaugaaacuguuguccaugcagcauguguguguucuuuuuaacauagaguuuguguugucaaugaccaucuacaucuuguguccagaaaauaagauggcagcuaaguguguugcaaucauuuauacuuccuuaaaauuaaauagcuaccuucucaaaaaucaagugccuugaucacuuguaggacuuuuaaguuacuaggcuuuuacuauuaguucagaaauaaggguaauaacuguuaaauauaucucuuaagaguuuuaucaacuauauuaaaauuauuuuguauuuuauaaaauuaugaaaucaggaaguuaacaucuugguuuuugcuguaugacuaaaugguuaacaguuugaacauuccaggcuaaugauacaauaagucagaaauaucugccaucaccaauugaauaugaaagugcaugaugcauguguuucaugaaauucacugugucaccauuugguuguuugcuugucauauugcucaaauuaauuguuuaaugcauuagcauuuuuuuuuacagggaacaaccacugaaacugaaaugagaaagagaaggucaaguucuuuccacguuuccauggacuuucuagaagauccuucccaaaggcaacgagcaaugaguauagccagcauucuaacaaauacaguagaagguugguaacaaauucuauuuucguuucaauuauuuucaccaaacuuauauugucucauuucaaacaaauauauuugugaguugggaauagugcauucuaaugaaaagacagucuaauucaagagcuguuauuucuuauaucuacucagauauucuagaagccuuaacaauuuauuuuaaaaugagugauauugggacuaagaauguuuuccuaacuguguagcaacucuuugaaaaugcagaacaaagcauuucuguuagggguuucuaaucucauuagucauagugacccucuuuuuguuccauuaguuuaagacuucagcaguacagcccuuuucagccucauccuaaguacucucaagauuguagaggaagagcaggucauuuucacaaaauaaaaacaagcuaaaaagaugauucuugggucacaucaaucccuauucuagcucucauagucugagguugacaauguagagucauucacauaggguugcacacacaauaucuacaccacccuaaaccauguucccauugagacgucacaugaaagaccacucauuuaacuugaggccaagugcugagccacaaugucagugcauaagacaaaaaacuacccauuguuaccugggcucuaugugugugucugaugaaauauccuugggagguuuagaguaaacuguaauuuuuuuaacaaguacaaaaaagguugucucuguaacaaaaauguguugauuacugaaaauaaguuuaguggauaugaaauaaauguguguguauaaaguauaccuuuuggugguucuuuuuuuuuuuuuucuuaaucuagaacuugaagaauccaggcagaaaugcccacccuguugguauaaauuuuccaacauauucuuaaucugggacuguucuccauauugguuaaaagugaaacauguugucaaccugguugugauggacccauuuguugaccuggccaucaccaucuguauugucuuaaauacucuuuucauggccauggagcacuauccaaugacggaccauuucaauaaugugcuuacaguaggaaacuugguaagcauauuggaagguaaauguguuuagucuucaaauuuucugcuugaaaaacuguuuacauuuaauuguguauagcagucuuucaaccauccuucaugcuuccuggccccugcaaaaucgcaauuauauuuagcuggcuauacucuacuuuuuugccaaaaauaaucacccuuaaugugcucacaaaaacugagaaaggcauaggccuacagcacuacuugaaaagucaacagcaauauuuauaauuuuucaggauccagaaguagcucauagauuaagaacauacuuuuugagauauuauuacaauuucccuuacuguagaagauuaaaauaaaauuguggaucucuuuuauccuucuuagucaucaucacugcaagaaauaauuuaacaacucaaaaaugucuccagcuuuuccucuuccaggaucuaaguaguacauguauuguuuauccaucuauucuauaucaaaaccaugaacuauugaaaacuuccaguacauuuuguguguuauaugauuacaaaggucauuuuuggugaagauugccacuuaauuuuuccuuuuugugcuucaaaaacauaaauuauuaaaguguuugccagucaacucaacuuaggaauacuagcuuuuauuugcugaaggaaagagcuaucuaaaguaauuuaugcauuuccuguaauauuugguuugaaguuuaggauuuuugaugguagaaaacaaaagcaucaugcauaacaaccugcauuuuauuaguuauauuuuugaaguucuacuauuuauacuacagaaguaaauuuauuuuuuucaugugcauaacaaagaaugacaauaguaaugcaccuaguauaauagauaagaauguauaacucugauugagggaaauaggaauaagcuuauagauaaauaaaagugcucaugggcaaaauguugucaguacuugugguauauaaagucuggacaaaaagguaguuugguauaauggaaagagcacuguuaaaaauagaugacuugggcugggcgcaguggcucacgccuguaaucccagcacuuugggaggccgaggcggacggaucacgaggucaggagaucgagaccauccugccuaacauggugaaaccccgucucuacuaaaaauacaaaaaauuaggcgggcgugguggcgggcgccuguagucccagcuacucgggaggcugaggcaggagaauggcgugaacccaggagcuugcagugagccaagauggcaccacuacacuccagccugggcgacagacugacacuccgucucaaaaaaaaaaaaaaaaaaaaaaaaaaaaaaaagaugacuuguacucaaauccuaguuuugccauuuucuugcuguaugauaucaagcaagccauuucacccaucugaagaccucaguuuccuuaucuguaaaguaauaauuguauauuaucuacuucgcguuuccacaaggauaaaauuaaauaauguauaugaaagucuuucaucaacuacaaauugccauacaaauuuaaguuaguaauagaaucauugugggaaaauagcauaagcauuauguucuaagagcaaaucuuaugucauguauguuauuaucugguggaauuagauuaauuuuguuuugaucuuagguuuucacugggaucuuuacagcagaaauguuucugaaaauuauugccauggauccuuacuauuauuuccaagaaggcuggaauaucuuugacgguuuuauugugacgcuuagccugguagaacuuggacucgccaauguggaaggauuaucuguucuccguucauuucgauugguaaaaaaaaaaaaaaaaagcaccaaauucaaaaaccuuucuaacaaucaggguucuugcauagcaaugucauaguuuuuuugccacacaaccauuagcauuguaaguuuuucuguaacauuugcauugucaaaaacuuuuccuacauggaaaaaaauucucaauuauuuaugaaaaccuuuauuucaaagaacauaguuacguaaaaguuaacguauuacucaguugcuauuuucacuaaguauugcuucuagagacuacuacaguuaauauuucuagaccuaagaaaauauuuuuaaugaaaaugcaucaccuuuuaauaguaacuugaaaauauauauagcccuuuguagcaguggaugaaaaucagauguaagaugugcaugcagaaacuuuuucuaauucugucucuggaaaauaugcaucuugcgaaagucaaaggagagaaagucuguaggauuacuaagcaugcccauuaauucacacauauauccuuacaagucaggaaaauaauuguagaauuauaggaaauauuccaaguuuuucaaugcagguggauguaacuacaugaauaccccuaaggagcauuaaugaauaaugaacacuuuacuuauaucagggcucaguaugauguuacuuugcacacuacuggcaaauuaauaucuuucagcagagauauuucagauucagauguuaauauuauaauauccggccuuagaaccaccuuuauaaaacaaauuaagaacaguuggauuccaaguacucauuaaaaauucacuauaagaggccuggcuugguggcucaugccuguaauccuagcacuuugggagacugaggcaguuggaucacuugaggucaggaguucgugaccagccuggccaacauggugaaacuccgucucuacuauauauauauuuaaccaggugugguggcacgugccuguagucccagcuacuugggaggcuggggcaggaggaucacuuuaaccugggaggcagagguugcagugagccgagaucacuccucugcacucccgccugggugacaaaagaaaaaaaaaaagaaaaggaaagaaaaauaauucaccaucagagaaaaugaucuacaugguuaaaauauggaaaauccagcuuuuccuagggaguccaaaaauuagccaugagccugagacgguuagggcagaucagauauuguaagauauugaauucuaaugaccauuucuagguaaagcucaauauauauaaugcuuuuaagaaucauacaaauauauauuaaucuuucauuuuccagcugcgaguuuucaaguuggcaaaaucuuggccaacguuaaauaugcuaauaaagaucaucggcaauuccgugggggcucugggaaauuuaacccucgucuuggccaucaucgucuucauuuuugccguggucggcaugcagcucuuugguaaaagcuacaaagauugugucugcaagaucgccagugauugucaacucccacgcuggcacaugaaugacuucuuccacuccuuccugauuguguuccgcgugcuguguggggaguggauagagaccaugugggacuguauggagguugcuggucaagccaugugccuuacugucuucaugauggucauggugauuggaaaccuagugguauguacccacuuaagauaugcauuuuggaaauacaccagcauggcacauguauacauauguaacuaaccugcacauugugcacauguacccuaaaacuuaaaguauaauaaaaaaaaagaguauaauuuaauggugacuguuuugucaaaaagaaaaacaaacuaugauuauugguuuaaaaguccauuaccuuggauauauuaucacuuuaacaacacagcaauauagcagugccccugcauuuuuuauaccaaauucuauuuugucagucacuuuaucacauuuuuuaugugaauuacaauagaguaucauauugagaugagccuaaaaggaugugcugggaccauuuuauaaauucagagccaaggaagagagaagucuaaaaaaaguagagagaaagugcaaaauuaccauccagacuaggacuaaaaaguggugucuuuaagaguucauaaugcuugugccauuucuuugccccauugcagcauaugauauucaaucacucuaugucauauggcagaugcacuagccaaccugaguucaucaguucucgaauggcuaaugaugccugagauuaccauaauggaguaacugaucaaucuuuaucucucuuaaauuuggaguguuacuguuuauaguauaguaauacauaaaauauucuaaagguauguacauucaugugccagucucauggaaauaugagagauuauucauaaacagcucuacuuagucaacaaugaaguaugagaaauauaauagauuaagaaaacaagugucagccuauguuaagcuccuaaucuucauucugaguuguaaugguuauuuuucaauugacauccaauuuaauaucuuuguuuauugaaaaauuauagaaugcauuuaaaugcauacuuggaaacauuagugauuuuuaagaauucucguauuguacacauauaaaucuguuuucuucuacucauacaauuuuagaguuaacaaaaccuuagauuagcucauucaauuucacuuuacgaaugggagaacuugagagcaacagaaaucaugucuuuguccaaggaugugcuauugagccagucacaaauucagaucacccaucuucuaaucacuaugcugugguguuuccuucucaucaaguuuuagaacuuagaguuuuuuccacacuuaaaagaaagaauaagugauuguaaucugcucuucccuacauugguguaaaauuauaaucauguuuuuguuguuuuuaagguccugaaucucuuucuggccuugcuucugagcucauuuagugcagacaaccuugcagccacugaugaugauaaugaaaugaauaaucuccaaauugcuguggauaggaugcacaaaggaguagcuuaugugaaaagaaaaauauaugaauuuauucaacaguccuucauuaggaaacaaaagauuuuagaugaaauuaaaccacuugaugaucuaaacaacaagaaagacaguuguauguccaaucauacagcagaaauugggaaagaucuugacuaucuuaaagauguaaauggaacuacaagugguauaggaacuggcagcaguguugaaaaauacauuauugaugaaagugauuacaugucauucauaaacaaccccagucuuacugugacuguaccaauugcuguaggagaaucugacuuugaaaauuuaaacacggaagacuuuaguagugaaucggaucuggaagaaagcaaagagguaagauucuauaggugugggaagguaugaauacauauacauauauacauauacacacauacagaugauccucagcuuaaugauguuuugacuuaagauuuuuuuuuuuuuuuacuuuaugauaauacaaaagcaauagccauucacuagaaaccaugcucuaaauuuugaauuuugaucuuuucccaggcuagcaauuugugguacaauauacucucaugcugggcaggggcagcaagcugcagcucccagucaaccacgugauuacaaggauaaacaaccaauauuuaccguacaguguacuguauucaggaaauuaccugaguuauccaacaguuuauuauaaaucaugcuuuccuuuagaugauuuugcccaacuguaggcuaaucuacauuuccugagcauguuuaaaguagacuaggguaagcuauaaaguuugguaguuagguguauuaaguaaguuuugauguacaauauuuucaacucacaaugaguuuaucaggaacuaaccucauuguaaauugaggaacauuuacaauacaugcauuauauugccuguauuuauuauuauauauuuuccauauagauuuuuuugacaucauguaaaauuuuauuucacugaggaacaaaagauuuaacucggaaaugacugauaaauuaaaggguaauauaguauacgugugaguuuucucauccuuaguaauggauauuuguuagaugaaugaaugaacgaucuaacaaauagacaaacaucaucagauuuaauccuuacaauaaccuggaaagaaauguguuauuauguuaacuuuucagauaagaaaauuagcuuagggagcauuaggucacauagcuagugaggggagugccgagaguugaacuuagagcccuuguuuacaaguucuguuuauuguuuuuugcaucacauuggcucauguacauugaagagaacuuaacaacaagaaauauucuuguagcuccuucaacuaaaauuacacugcccuaugcauuagccuguuuggacugccauaacacuauaccauaacuggguggcuuaaacaaccaaaauuuauuuucucauaguccagaaacuggaaaguccaagaucaagauaccagcagcaucaaugucuagugagggcucacuccuuggguugcagacagccaccuccuugcugcguccucacauggccuguccucaaugcauguacauggaaagagagagaacucuggugucuauucuucuucuuauaagugcaccagcccuaucagaauaaaguccaaccuguaugaccucauuuaaccuuuaucaccaccuuacaggcccuauccccaaauacagucauauugaagguuagagcuucagcauaugaauuuuguggagacaaaacuuuaauccauagcaaccuacuuugaaauauuaaguuaaaagucuaauggauauauaagauaauuaacaaggagucuaggacaaagcaccuuuacuucccauuuaguguuuggaaaucucaaaaacagcagggugcccaucuuuuaggcuguauagucuaaauauuuuaaaggauugaauacauuaaagacauuuuauuagagauacaauucuauuagauaucaucauguccauugcauuuugauaguuguccauggaagauaccacagguaugugacauucuuuugauuuagugacuauaucccuuaaaagaugcuucaaguauuuauaaugagucucugaauaaucuaggucagccuccacuuuuaggaguagggggcuaauauuggagcuggaagcagcugcccugacccuagcauuagagcugcuuaguuaauucagauuuguuugaugagagaagggaaagaaauauagugcagagauguaauaguagauagauccugucacauuuccaugucuauggaaauagauucaggacaaaaaaaaaauagacuguuuuuaucaaauauuguggacuuuuuuacagaaauuuuaauuuggauauuaugucaguucagacuuuguuuauuugaguuuuccuaaggaaucagaugaaggcuaauuuuuugaaaaauuguugucuuuauaaaauuguuucugaacuucuguuaaaauaaauuuaguaauagccuagucuagcuuccuuugucuugaaucuuuagaccuacauuuagcauuugaugaggacuaauggcuaccauaugcuaucuguuauauuaaaaaggaaaaagacuauuuuacaaagaccauccauaagauauacauuuucuguaaaaauuugacaugauucuuacucuuauuguuuuuuuauauugaucaaggcuaaaagaaacacuaaccuuuuuauaaagcaacuauccacugaagcacuagagguaguucuguuucuuucuacuuugugguauuuuauaucuuggaacauugcauuaauugaaauuuuaaauguuaagguaauagaaacuuuagagauaauuuaauguggugcuucucaaauugugagucauaguuuaguuagacuugagaaaucccuuuaauaggccaguuuuuuuuuuuaauuuuaaugaaauagugauccgcccaccucagccucccaaagugcugggauuacaggugugagcuacugcacccggccaaugaaauagaacagaauaacguuagagcacauuucaugucagagggagaaguccugguaaaugaagcuuuugccaccugugcugaacuuuaauguuuuguuugucuaauuagaaugcaaccacuugguucaugggcauagugucugaaguccaggaguucuuaagcuucagaaagacuguuucagcuuuuugaagguagugauaaugaagccuuccuaacccuaggcagaacagauugcuuucuuuuuugguucccagagauauaaggcauagaguauaguaauaaauaaugcaucuucuugacucaugcgucuuacaaaguacuaucauauuuuaggguagcuacuuauaugcaugcaugucucuccuuuuauguggugaccuacuuaaacauguuugguacaaaguagacacucagaucaaacuuuuccagcucauucaacucuucuuaauaaaaccauucugaagggcucucauaaauacuuucucugauuagagcauacuugagauugucauuuuaauuccaauuauuuuggaccaauuuuuucucuagauucaagauucacuugaguuagauuuuguuguuuuuguuuuuguuagccauguuaccuugucacuuuacaccacccuucuaagaaaguaauaaucucucaucuuuuccacaugaauugcuguugaaaugcaguuguaucucauccagacgaaauuuuguaauuaaauacugaaacuucuauuuauccccuaaugauacauuucaauuucuuuuauucauuuuugaaucuggcuuucuuuuuauauucuuucacagauuaccacauuguaucaaauuuccuggcacuuuuacuucacaauuccuuucuucuuggucagaaauaaacccacacaauauuguuugcccucauugcuucaucagucuuauacuguauucuguucaucaaaguaaggcauaaauuaugagauauucugcuuuuagaggaauuaagcugacagcagaugccccaauagaugaagagucuuuguucuacauuaggaaugcugccuguaguauauuaaucucaucauuuugguucuuuuuguuuuagccuuuauucuuuuugccuauuuucauuuauuuaucaguuaucauaugccagggagacuagauaaaggaguauacuaauaagcuauaaggaaugauuuucucucucugucucuguguguguguguguguguguguguguguguguaugacuuucaaccuuuaaguaugaauuuucauauugagacauauguuacugaugcaaaaauguuaccuuucauggccucuauuagacuaguuucauuugaacauguuauuguuuccauuccugaauuccaguaaugacuuaucuacaaugcaucauuauaauaccuccaaaauuauauuaaugccuuguguuaaaauuacaagugcccacuguuuauucuucauacacuaaauauuuguuuuuagacaugugaggccacaguuauaaaguugguaaaugguuauacucuggagccagauacuggguuauauaauuucauuuuagccgcuuacugugugacuuuaccuaucuaauaaucaguuuccucaucucaaaaaugugcauaauguuacugacugcauuucugggacagaguauuaaaugagauaauaaaugugaaguacuuagcacagugccuaauuaauauagaauaucugguaaaucaucauuauuauuguuaccaguugcauuccacacuguuccaguaaguuuucuuacaagaauuacuacugguaacauacuccacuauuugucuuuuuuuguuguuugccuuuugcccucuguaauaaauuguuuuauaaguuuaucuggggauggugauacauuuuauauuuucuguuuauuuuuaaauuguuuugauuacauucuugauaugguaagcuccuuaaaauauuuaagaaaauuacuuuucuaaggggcauuccaaucaggaaauacaaacaugcagaaaccuaaagacaggaagcaagaggauguauuuggagacaauuaguaguuuggaauuccgggggcguaaaucacaggagcugaggaugagauguagguaaagagucuugguuuccaggaagcaagaauagacugguaugaagagauguggugaacuggaaccucauauuuauuuugccucuuacaucuguggugaacucacaccuaacuauccuccauuccagagcaaacuaagggcuguuuuuucuacaccuuccuccuauuggucuccaaaagaagaaagggaauagcaugagucacauuucauccucucuuuaaguccuaagagacuucaaccuucaaaguacauucaaguaauuugaggaauuguuuuuuaaaaccucagaaaauuucuugacucaugccauaguaggaauaaugauaagcuagaaacaugaauuuuuauugaacauuaauaauaaagaauggugacuuggacagaucugagagagcuuugaaggcugggcaaaacugccaagacuaugcaaaagacaauauaaaaucuuaucuccccaaauagaaaguaaauuuauuuugguuuuggauaguauuuuauaacauuucuauccuccgaagcaccuaccacaaugcugggugcauaacaguugcccaauaauuuuuugagguuugguugauuuauauggauacuagauuaagagcuuauaagccuuaacucuacuaugagcaaaucgcuaaaucuauauuaccccguuuccuaauuuauuaaaugagauaucuguccuaugaugcuuauagaaauguuaugaagaucuaaaagcuauuuggaaguuaaaaauguucaaaaguguaaggugaugucaagaaaauuacuacuuaauuccauuuaaauaaaaauuuuaaauaaauugaguuauuaaaguuguaccuuuugggaacaaaaaaggcacauuacuaaaguaauuauaaaagaaauacauuuguuuuugcgaugagugagcucuagaauaaugaguaaaaaugugagguccuuaguaauucagguuauguuaauaacagcuauuguuuaaauguucaccauggacaaaguacuauuggagggcauauauugucccauucagucuuuaugccguaagacacacuguuauuccagccuuaagaugagaaaaauaaacauauuuugaacaaaggaaaacuugccaaaguuacacaaacaguaagugguugguccuggcagucugcuccauagucugcuccagagucacgcucuuaaccgcuacacuaaaucuuaauagugucugaaaauguacuuucuuuggcauaguucugaaauaaauaauacuauuuguugaagaacuagguacaggugucaacuauagauuugguguuaacuuccaaucacugcacauugggcauagguuaacagcauagucuggaguguuucagaguccuccugcuuaguccugaaagguccuguuccucugguacuggccugcacuuuaggcugaucugcuucugcaucccacacugaccugugguggucuaauucuacuuagagagcacuuagucucccagagugugauaguugugcuuaaggagcauccccuucugaguuuaaagcugcuggaagagucuuccaaaucauuaggaagaacuucuaugauguaucauuagcuuaugaggucuuugagaacaggaaaaacacuaacccugucuucccuuaaguccacagcacauacaacauauuuauuaaaugaaugaauaaauaggugaugggcaguuacuucuagauuuccauuuuuucccaauuauaucacugauauauaugcauuuuaaaucuacuuguugcuuugcugauauuuuuccaucuaauacuuuuaucuuacguuauauggguuaaggaacauacgacaaucuccaaccuaagcacauagucucuaagagauggcaacuacucucugcgaagaguacuauccauggaacccaagaguacuaucuccacuacuucuaauugaucacuagggacugccaaagcuaccuaucuuuguccaccucucugcauucccaaggccuuuacccagugucagaccuccaucaucuuccaguuuuacugcuacagccuccaaacgggucuccucucgcuaguguagucuugacaaaacaauagguggucuuucuaaaaugcaaaucccguaaccguucuguccucccuaaccuuucaggaguugcccauugcucacaguauggagucuauacuacuuaacauggguacaagucccugcaaaacugaccaccgcugacuccuucaguaucauggaauaguacaccucacaccuccccacccagcuauacuaaucuuucauucaauguaauucccuaugcuuuaucaguucucaucguuauaccuuuucucucugacaggaauacucucuuacucuauccugcuucaccugacucauccucacccaccacauccuucuugucccaaaugucacuuuauucuacccuguccuuccuagauugagcuaggugguguucucaauauacucuauacuacuccuauuagaguguguggcaauugcuucucuguauccuccaucugauugugaaccgacgagggcagauacuaagucuauuauguucacuauuuuauuuuucaaguccuaguuuugaugccuggcacauuuuugguagugaaaaaguucaaauaucaauaauuacaccuauuacaaacaauacaauacugugauggaaauuguuaccauuuaucaaauaagcauacgccaaacguuauucauguguuaucuuguucaguccuuauaacaaggaugugaaguaagaaccauuuuacaaauuagaaaccuaaagccuaaggaggucagaauaauugguuaaaguccauaaaaccagugauugugauucaaacucaaguuucucugauccucugaacaguaguacuuucaacucuuucauuauauagauauacaguuuauuugcccaguagacacuuauuaaguauguuauaauuuaacauuaaaaaucaaugucaaaauaacauuauagaagcucugugcucaauuuggcaaaaugaauuuaacaaugaaaauuacucauuugauuugcauuuugguuucuagcuuggggauuauaaaugcaauuuuucagaauuuuuuuguuuucuuuccaauuuuuuuguauuaccaugauuuucuauugacucaauaugucugaaauauguugcuuuuguucccuuauauuuaauuauugauacagaaguuuaugugugaccuaucgaaagcaaaauucagaguaguauauuagagccguauuccuccacguucacuuuuauacugggcaaguguuugacuaaagaauagaaacaacugacauucuguaaauaugaauaaucacugaagauuguccuuucaacauacagcuugaugaagaaaucaacugggaauaaugugggaauuaaugaguuaauauuugaguuuucuagcugcccuguggaaauguugagucucauuacagugucuuuuccauugauauuauauuuuccuuuguugagagucuuuaauaggggucauuuuaauuuuuaauaugcauaguguacaauagaaauauuuacuagugcacaauguacacaaugaaauauuaauacuagcauuucugagguuguagagaaccucauuuuagcaugacuuaggagauauaugugucacaauaguaaaguacccagcauuaaaauaguaccuguccagcuuuaaaaauaaguacuuuggauaauauucuuuauauguuaaauauauacauguguauguuaaauauauauauuaaauauauauguacacacauauauacauauacaaauauauagacaucgcaugaccacauauuaaguaugcuuuugacccuuaaauuccagauuuauuuauauuacuuauuauaauuugaacuccuacuaaacucuauaaauaagcuccuuauaacaaaccaaguuuaaaaauaaaaauauaaacauuguaggaucaagucagagaacaagaaaaaaagcauuuaaucacuuacucucagagaauauugaagaaaguuuucuuugccuugcuuuguuuugccuuacccucaaggucaaaaucauuugcuauaguaaagagcauuguuaaaaaacaagaaauuugcauaaauccacugcggaggaaaacugcucuuaccaucaggguuguaguuauuaagugguuauugaaugcccugguguacaaggcaaaguggaugcuucauauacaacguggucucugcauucugucagcucacauauuaagucagccugccaaaaauacauggaugauacaagucaguguauaaguguauaauuuagcuauuaagauucaugugugaaaauauacauauucuuaaauaaacuagccuauuuagaaauugguaaaauuuaagguugauucaugguuuaauaaacauuaaaauagauuuuaagaaauauuccgggaggccgaggcgggcgaaucacgaggucaggagaucgagaccacccuggcuaacacggugaaaccccaucucuacuaaaaauacaaaaaauuagccgggugcaguggugggcaccuguagucccagcuacuugggaggcugagacaggagaaugacaugaaccugggaggcggagcuugcagugagccgagaucacgccacugcacuccagccugagcgacagagcaagacucagucucaaaaaaaaaaaaaaaaaaaaaagaaagaaagaaagagaaauauuccauuaaucucuaaaacagugagaacaaauuacuuuauuagugaauagcaaauuucaaaaugaaauuaaauuucaaucuaagaacaaaaaaggaaaaauuaauuggccuuacugauuuuuaaaucuguaaaaauacuuauuugagaauauuuuaguuuugccguuauugaauuucuuuagaauuuuauaugaauucguauuucaugugcuaacauagagguggacuuuuccuacacaucugaagaggagcuuuuccuucccuuuuugaguauuuaauaauaauaguguuauuaucccaaucaaauaaagaauuggaccacuucaucuuuuaucucaaccguuauaagaauauauugaugcaaauauacugguuaugaagguuuuaauacaacuuuuuuagccuaugguaaaauauuuuaaaaaauagaugacaacauuuagauuuuggauaauauuaauagcaaaaguaaauaugacuguauauuaucucaaaaaacauauuuacagaaaauuuuuauuuucaaggguucauggaauauuucuauaaaaguaaccauauacuggaguucaaaguaaagcucaauaaauuuaaaauagcuggcauauaggguuauccagucacaauguaguuaagccugaaauuaauaauaaauugauagaaagaauuccaaccauuugaaaauuaagaaauugccuccuaaacaaauauugaauaaaagcauaauaaaauaccaaaauagcuauuucaaaaauaaaagcauuuuaugucaaaauuuguggaagaagaccaaguagucauuaauaugacuuaauauuacuaauaugauuaagaagggaugaaagaaccuaacaaauaucuuugagaaauuagaaaaggaacaaaaaaggaagaagauauacauaaagagaaaaaauagugaauuaucaauguagcagacaauauugguauaacagguuaugguucuuaggaaaaaaaaaucaguaagacacacaaacuuugguguaucaggcagaauucuaagaugaucucaaugacacuugcccuuguauaauccccacuccaugagugugguuggaaccuguggauaugguaucacccuuuaauuacauuacauuuaugacaaaaagggggaugaugcugggugggccugaccuaaucaggcaaacucuuuaaaugcacagugauuucuccugcuaucacauagaggaagcugaaaagauaugcucugccuggccuagaaaaaagcaaacacccauauuguaaauugcauacagcagccauguggccagagacuauggguggccucuaguugcugagagugguucugggccaugagcuggcaggaaaguaggaagcccagucuuauaauuaugagaaaugaacucugccaacgacaguaaacuuggaagaagauccugagcccuggaaaagaacuggauuuccagccaacaccuugacaucaucucaaugagacccugagcagagaauccaacuaggcagugccagacuuccgaccuacagaaacugugaguuggugaauguauguuaagaugcuggguguaugcucauuuguuacacagacacagaaaacaaauacauuuggcaaauaauccuuguuaggaaaacucaaaugauuuucuauguguaaagagcaauugcaaucaaauaagaacacuaauacuccaauagaaaaauaggcaaaagaccaagcaccguggcucacuccuguagucacagcacuuugggaggccaaggugggugaauugcuugagcuccggaguucaagaccagccugaggaucagaugcugucucuacaaaaaauacaaaaauuagccgggugugguggcaugcaccuguagucccaguuacuugggaggcugaggcagaauugcuugaaccugggagguagaggcugcagugagcugugacuucaucacugcacuccagccugggugacagaaugagaccugucucaaauaaacaaacaaauaauagucaaaagagacaagucauaaaaaauauaacuggaagacaaaccuuaagaaauauuacuccuaauuguuaucaaauaaguuaauaucaaaacaaugguaguguaauuucugcuuuucaauuuggccaauaaaaaagaagaaacaaaagcaaaacaugaaaaggaaaacaaaacaaaaacccagguaaauaaugcauuaugcugaugaaggagauccaugagacagauacuuaacacaaaucucagaacaugguaucuuucaauaaauguugaguaauugaauauuucauauacagcuaauagugaaauuaaaagcccagcuacauguggaugguuucuuugucucuaaggugggaauagcuauuugcuucuccuuggucagagaugaucacaggauuuuucauuuauuuauuuguuuguuuguuuguuuguuuuuugagacagggccucacucggucauccacgccagagugcaguggcgcaaccacagcucacugcagccucaaccuccugggcucaagccguccucccaccucagccuccaaaguagcaugcaccaccacauccagcuauuuaaaaaaauuuuuggccaggcgcggugucucacacuguaaucccagcacuuugggaggcugagguagguggaucaccugaggucaggaguucaagaccagccuggccaacauggugaaacccugucucuacuaaaaauauaaauaauuagccaggcaugguggcaggugccuguaaucccagcuacuugggaggcugaggcaggggaaucgcuugagcccgggaggcagaggucacagugagccgagauugcgccauugcacuccagccugggcaacaagagcgaaacuccguaucaaaaaaaaaaacaucauuuuuuuuucuuuuuuuuaguagggacagcaggaucucacuauguugaccagacugaucacaggacuuuuuuagccacagucccaacauguuacccagacugugcaggcccagcagccauacccacucugaacuuccucauccuuuucuccuccugaguccagaucugcucccucaucaccuucucaucaguccucacuucauaucucucuuggauuuaagacuguccaaauguaucauuucaaauucucaaacacuacaaagucauagaaaauuaaagcuggaacuuuaaagaucaucucuucauuuuacauauuuaaaaaaugggcuaaaggaagaauuauuugagcaaagccacgcagaaaguaagaggucaaaccaggucuggguuucuuuccaguuuauuguugguggcuuucuuuccacuacuguggccugggccaggagaagggugaaaaaauaagguuguuggcuccacuggaggccauaacuuguuuuaaaaguucuuggaauagucaauucagaaauggugagugacagaugugguuuggcuguauaaaguaauuuacaucaucuacuuacuccauauauggaucauuuuaccacaugauaauguauacacauauucugcauauaugcaaauaaaaugaccaauaugcauacuuauuguaaugagguauagcuauaaaauauucauagaggcaccauguugaauuuaaaaagagcuuuaaaguugagaauuuugcauccuaguuuguuuuuuuuuaaccuauugugugcuuuuugccaaaucaauuauacuauccaggucuacuuuaccaaucugaauauugcaguuuucugaggucauguucaauuccaacuccucucagcuucuaguaaaaaaccugaguauaauuugucaaguuuaccugauugguaguauauguuuucacguagcaaagcuuucacauuuugcugcuucuguaagccugguuguugguacuuaacauuaaaaagucagaacuacuaauuauuuauuucuugaagaaaaaagaaaacauuguaacuuuucuaaaaugauucggugugacaugaucaccagagugacaucccauuacuuuugccacauuguauugguuagaagcaagucacagguccugcccauacauaagggcaggggauuauacaagggcaugacaacaguggccagaaauuuuggagaccaucuuagaauucugcuuacuacagacugucaugaagaaagcauguuugcagacauaaagaagagauucuuacaugucauucaacauacugucaauucuucaaguuuauagauuaaaccccugaaauaacuuuuuuaauacccacaaagauacugucucuucacuugguauuaccccgccccccaccuaguuacuagugguguuggugacaaauucuaaacuuuaagagccuuuuuaaaauaauagcucuuugcauuagcuuagugccaaguuguuucaucugaaauugcuaaaucuugaagauuuuuuucauuuuaucaccuuuuuuccacugaaauucaugauacuaaauuccacauaauuuccccuauauucaccacacauauuuuuucuuucauuuaacaucaucuucuuaaauuugggcaugcauuuccccaaauuuugauucaauuaugguuuuccaauacauuuucaaaauuuuuuaaauuuucauuuauguauuuauuuauuuuagaaaugggauccagcuauaaugcugaaauuguucccaaacuuauaaguucaagcaauucuccugccucagcuucucaaguagcugggacuauagggaguuuuccaaucuuuuaaauaauauuuuaaucaaauuuuuucauguaucaugcauaaauuagaugaaaguggaacuucccugcuugaauuaaagccuucagccacuuaaggcuggagugagaucucuggagaacauuggcuggaaacaccucuucugucauauuaguaggacagaugccuuucauugcaacauacauacugaauguugguauaauuguugauugaaauuuagcuguacaacuuaugaucugcagaugauagacuuucucuaaguucuaaaguacauuaaagacuaagcauauagcauuuuagaaauaauuuauacaaauuauguguuuaagcuuaaugccuuucuuguuuuuauaaacuuacuaucaucuuugagaaggucugggugacuuuuauauuaauguuuuuauuuauuuuaaucuauugacuauguaaaagguuuacuauuuguuuaauuuaauuuuaauuucuguauuguauuccuuauuuaacaugccaaucaaaacucuuguuguuccccauguuuuggcuaaaaacaguuuaguucggucacuugugaacuuauuuuauuuuguuuguuuuucuuuccuuucuuacacuaaugcucauuuauuuacauuauauauaaauuucuagaaaaagcacuaacacuucucucagguuaucauaguuuaucuagaguaauucauugacauaagccccacugcuuaugguuuaaucuuucuaauagucacaugucacuuuuucugauguuauuaugauuugaaaguaggggaaaauucuucuuacuauuaugagaaucagggucuaucauaaggguuagccaugauguggcuuaccagccucccuuugcaaaaugcugacuugcgaaguagagcuuaagccaaauaugaauaccauuuuuuaaaucuaauuuuuaaucauauauuguuccugaaagauguauacacuucucuggaucccaaacauucaacugcuccauuuauuuacaaaauaaaaaugacauguauaaaaaugucacuuuaggugccuuguuccagcauggguucauuguuuggagugcuacaucaauguuuuagcaugagcugcacuuguaauucaucaucuauuauuucuguuuaguuuuuuuuuucccccagaggacaaauaucuuaacgaaucauauaaagcaaccugaauuuaguaucuucucagaaauuuauauuuguaacuauuuaaaaaguaaauauucacaccuaauuuuaugguuuuuuaauguacauguaucuaugugggggauuuaccgguguuacguuuauucaaugauuuugacuuaguuuuuauaaauacaacaacacuuuuuaaaugcauuuuucaaauucuacaagauuaaauuacacacuuacaguauuuuagaauaguguaaauugauuugaaaauaaacauaacuuauucuugauaagcauaccauucagcuggugaaaauagaaaugugcagauauccuaggcaguagccaacgaccugagcaauuuuugcacaucaaggucaucaguuauuguauuuuacugagaaaacugcaagugucauuaauuuuguaaguaaguccauuagaaugaagagaaguuauaauaaaauauaugcccaaaguagucccuguaaaguguugaaagggguuuaaauaagagagcaauuauuacucuuccgcaaugaugggaggaaaaaucacuaggagaaaaagucagagaacauuaagaaguucaccuugggccgggcgugguggaucacgccuguaaucccagcacuuugggaggccgagacggguggaucacaagaucaggagaucgagacccuccuggcuaacauggugaaacccugucucuacuaaaaauacaaaaaauuagccgggcaugguggcgggcgccuguagucccagcuacuugggaggcugaggcaggagaauggcaugagccugggaggcggagcuugcagugagccgagaucgcgccacugcacuccagcguggacgacagagcgagacucugucucaaaaaaaaaaaaaaaagaaguucaccuugauuaacauacagcuucuaucugugaaagacaaauuugggagauuugguuggaacucuaaguugaaaacaaaaacuucauccaucacuaauaucugaaacagagguauucaucuauucauucauucaccaaauguuuguuagucauucaccauacauacacuaagcuuuguggaccacaaaggucuaagucacaugaggcuagaaugaggauggccauuuuuauuuauaguuaaacaaagaaaagguaacaagaauaaacagaaauuucauaggaauuuggaaucugacugagaaaauaguuauuucagagauaaaauaaggaaaacugacuuuugauuacugccaauguuugaaauaaguaaaaguaaacaaaaaaauuugagucugggugcugaaagagugauauugcagaaucaggaauuugguuaaagaaguauguuuaagauuguuuaaaaagucauuacuuagauugagagcauacuaaauuugaguauuauuaggcacaccuccacuuuccuacaguaguucagacagacuguagaauauacuuauauugcuuaaaaaauguuuuaaaauuaauuuguaaacauguagaagaucacuugucuagaccugcgaacuuuccaagugcagauauuccauuggaaugcuaauaagggcauuugaucaucuuuuaaaucaccuuaaaauuucugaaauauggagugacuccaagcucuaugcauuaaaaaaagaaagcacacuuagaaguauauuguauccauccauugugacuaucuuuggcuuugccauuaauguuuuacaauuuggagaaguaacacuauucaccaauuccuggaucuacagcccacccauggucccaguuuguuuauaaaguaguccucaugaaauagcaaaguuauucagaaacauuuaacauauuuuaaauauaagauaauuuagaguucauauuaucuuguaauguucauacaaucauacaguucauacaaucuuauguuauuaauauccacuacauucuucaagaguuaccaauguaauauggguacuuacaagcgcuugcucauguacuuaaaauuaguaguaaguuuuacuuuccuaacauuuaguagacaggguagaguucguguauguccaauugcaugccaacucuuauauuguucaauuuuccauuuugauguuauucucauauuguguuacaucaucauuacacuaucuugguugaguaacucaaagggauaaaauaggaauggaaaucauauaaacuuaaaacucagguuuuuuugugaauugagacucuaaugaaaaaacaucagaagaaccauaaaucuacauguauuuuuaaaaaguaauucuguaagagugaccaucuuagguaagcauccuaaaaauaaaugucuaaauaagaaauauaagaugaauaucugaauauuaaaacuuauugaacuguugaucuauuugucuucuucagagaaugccauuuugaaaaugugucaaaaaguaacauaaggucuuuuggguucucguaauuuucacagaaaauagucacaacuuagguaagucagauaagucuuugucuuagaaaaaguaaaaaacaaugcuuuaauucauaaagugaauaagugguuucacuuaaaggcagaauaaaaaucaaugcuucagagguaucauuaaaaguaguauuccucauaagaaaacaaauaugguuggcaaaaaagcaaaacuaguuauuggcaauacuuuauuaucaguguaucaguauacuuuaauaucaugcaauaacaauugcaugauauuacuaguaaucaaggaagaacaauuuuuauguacauguucaugccaggaucuaauucaccuuacaauuggauaaaacacuuaugugcaaagaaucaaucauuuaucuguggcacuuacaugaagauuaauuacugagcaacuuuuuguucugcuuauuacugacaaccuauacugaugaagaguagauuuuuaugcuaauauucuauuauuuugugagucuugguauagacuggaaaacuauguggggaucagaccuagcagauaacaauuauauauauagaagguagguuugcuauuauaauucuuuguaccugaaugccucuccacacaaauuuauucacaggaaauaauauccuuucuaguucuuaauuaauuuuggcgaaaauuguuaaaauucucaaauuccacucucuaauuguuucaugaagaaugggcauuugcuuuucuacagugaagaacaaugggugaugaaauguugcucacaugguuuuuauaaaguauguaaugaauuucauuaugucccggauagugccaaucaaggucauuuuuaaaauaugaaggcacuuguugaagugacaagucuuagccuaucacuuuacggccaaaugaugaaucuguguaauguugaggauaagacauaagaauuucuucagaagaucaugugauguuaugaguaguuugauugagaaugugacuaacgccugccacuaggugauucucuucguuugucagaggaagaaaccaaugacuuauuccuggauauguuuuaaauucagugcaaaugcuagaacagaacacaaagauagucaaagcuaaaugcaacccgaaaguagauuaugaucuauuuacuacugucuaucauguugaacaaucaacuuuucagcuucugagcauaguaugcaggccuauuuaauguguuagaauguugaaauuagucuucagugagaaauauuuuauaauuucaaagaucaucuucaaccugaauucacagagcuaugacagagcuacaugccauuauagguccuaauuuucuguaacugucagguaaguuuuucuauuuuaagaaauuaaaaggaaaggaaagaaggcaacuagauauggacccagacauauaagcuauccuucuucaagcaaauacaaauauuucggugaaacuuuuacugaaauaucaacacucuccuauguaugugaaauucauauuaacaauuuuaauauuguguuuaauuuuuacuauuuacaauaucgugauaacggguugaauggcuugcugcugugugcacuggaaugccuauugucgggucuacauaagccugaaguuuagaaaauacuguacuagauuugauacuccaauaaggacaauagauauuucaguuaucagugaauacucagcugguagcauauuguugguguucaaaaaauauuaguugaauaaauuaaugaauuaauuacacuugccaaaaacuuauaagccaguuugcuggucuucagaaagagcgucaugaguuuuuccuaucuuaauauguuaguuaauauuuucuauuaucucugccaucuuugucuucugagaacucuagaaagagaaaugugcaucccaucacuauugucaaaauaugaaggauauuguuauuguuguuguuguuuaacuagauuuuguucuuucagcuucacauggcacauuaacauaaacaugauuugucagaggaaacugaauuuucccacacacuauuuaucucauuuuacaacacuucaggcucuaaaauacuugccagaaauugaagaugucuauuuaauaucucuaagguuguuuauugauguaauuuuugacauauuuuauaacaauuucucuccaaaugaccacauuuauaguaaauaacucugaacaccuuaaccaugaaucuuaguaacauaagugaaaacaacagguaguaucuguacacacagguaagacauuguuaaagaaauauguaaagucaaacauuaaacugcagaauaaccuaacgacauuauuuucuucuaagguaagcuuucucuuucucuccugcuccuuuucccuuucucuuccucccucuucucuucccuguguccccugcuucucuaauccacaaggcaguguuuugcucaguacauguggcugauggccuuuuguaaccucauaacauagcaaucugauuucaagcuuacauugugaauuaugguaaaaggguuagcacagacaaugauuuucuuauuucuuccccuuauucaaucucucuuuuucucuaaaaauaucucuaccucaagaagaauaaaaaacaaauucauaguaauaauccuuucuuggcaggcaacuuauuaccaaaauuaaaggacuuuacuuucuauguccaucucacuuacagaaacugaaugaaagcaguagcucaucagaagguagcacuguggacaucggcgcaccuguagaagaacagcccguaguggaaccugaagaaacucuugaaccagaagcuuguuucacugaagguaaagaaaagaauccuaauguuaaucuuucauuuggagugcagcuuguuuagcuguuggucagcuaaaauaaaucacauauaauaaaauggcacuuuguaauagauauaauucaaucaccucuaauauguugacagacaaaaaaacuuaaagucuagugucaugcuuugauuauaucugcccaauauguggaagagauuaagaacauggaggaaaaauauuuuaguaccaucaaaacuucuaacuuauauuuuuaaaguaaguagugauuucacaauaaguuggcaucuuagacacuacugaaaaugauccuacacagaauuugccuuaaaaguaacuuucugacugcuaaaacuaaacggauugcuagugcuaaauuguguuucuuuaaugaaaacaucaguuuccaauaauuguuggaugaaauggggaauaaauacugcccuagaaacucuauaccuaaacagucacuaguugagccuggugcaguaugggcaauagauagaagagauauguuuuuccuacaacuaauauuuccuguggucugauaucccugggaauuugagguuuggaaauaugcauacuuucuauuugauguuauuuuuucauaggccuaguauaccuucagucuucuucuauucccuauacaaaucaugcauaucacuuaauguccuuuucaaaacugcccucaucugaccaugguggaacagcagcuuguuccucugaauggcuguaagaaguauuuccauuuaauuuacccgauaauauacauuauccuaugaaaacucuuucucuuuuugaacaguuacauguuacuuuucuaucuuuuuucucuucuuuuccuccauuccuucacuccuuaguuccuucuuuccuccuucccuucuuuucuuccuccuuuucuccauucauucccuuucuccuuuuucuucaaacauaucuuuuccuccuuuuuuuuuuuuuugccuuggagcagggauccuguauuuauaucuuuuucuuuuuuuuuuuuuugaaaaccagauuuuuuuugguaagguucuugggaguaagguacauguucggugccuuuuuguguguguaccuaagugccuuugugcuuacaaugguacucagaaguaccuguugauugcauuuagacuaagugaaagcaaugugugaggaaggcaaugaaaagucaaagccaaaucauacaaauuagcuuuuagugaacuaaauuaauuaugcaaauuacauaagcccuucuaggcacaucacaaaaaauccuaaaugguaacaaaugcagcauuguuggaagagaucuacauuuuuacucuauauccuuuauaaaagggaaguuuucugcuuaacauuauuaauguccaauuuaaaguucuuuucuggagugacuucaacagagugcaacaggaugauaugguacaaggaaaagcuaccucacauuuauuuguaauuuacaaaguuucucuuggacaauaacacugugaggcagacaaagcaaauacuguccgcuagggcaucauuuaaaguggcugaauguuuccacaacuucacacagcugaugaaugugcucuuacuacucuaggcuuagagagcuaugcuagcaagacagagaugagcauaguaauaaaaagacaagacaaggacauugcuaaaggauauuauggaagcagagacacuuuaucuacuuuuauuucaacacuuucugcaggcuguguacaaagauucaaguguugucaaaucaauguggaagaaggcagaggaaaacaaugguggaaccugagaaggacguguuuccgaauaguugaacauaacugguuugagaccuucauuguuuucaugauucuccuuaguaguggugcucuggugagugagauuaagaaaaggugauacagcacuaauuuuuagaacacucuaauacugaugacuuauuaauccuuuguuucauugucuuaguauccaaugcauuuuuaauuaucccaccuuguaucuucuauagauuuacucuauaacucuauauuucuggauuaacuuuuacuauguauguaaauauaauuuuaagaagcuaaucauuaauuuuugcuuacuauuaaauagcccagaaaguguagcccuucagcuuauucauuaacaccaaaggaugugaauauucaauuacucauuguuuaauuaaaaaaaguuauuggaagcccugggaugggaauauauauucucugaguucugacgaauuuuguuucuaaaugguauuuauuauuauuaucucuugauggacaguaguaaguccuuagggaccacuucucugucuuuuuccaauugugugcucacuauuuuugugcuacuuaagaaauaaugaaaguugguaacaauaaauauugggcagcaugcccaagagauucauuuaaggauggguuuaucuuuauaacaagguguucacuucaucagaaucaauuuauuuuuauaggaaaauuauuuauaaaacuauaaauaaaacauacagauagcauuuuagggaaacacuaacacaaaggaaauaccauagauagaaaaagagaaagaaagagagagaaacagaguuugccugauugaaaugcaaguguguuacaaguuuaacuuuuuauaauucuaacacagacauauauuuaccuguaauuuuucugaagaaagaaauauuuucuacacgcuacuuuagaagucuuucaccguugaaaggaaugcauacuuagaagugaaacaucgagagguucauaauagaagaauauauauuagaaucuaaaugaaaaguaauuucauuuaaucauugucacacuguaugucuguugagaaacauaaauuauuaaaaaaauaacaaacaacaacaaaaaagaagcagaugaacccaacuauuuagucaaauuggagacugcgaagaucaaucacaauuucugcuuuacaaaagcacaagcuuucauuauuucuucaaccuccuuucuauagcaaaaaaaaaaaaaaaaaaaaaaagccaauagaaggaagcaaaauaaaugaaacaaaaggaauacauaacuucaaguugggauggccacaucaggauacaacaucaagaacuauuuccugacuaagucaaauuaauucauuggaaucauacuuuucuuuuucuuccaccaauagucuuuccccugauuaaauaaguaaaagaccuuugcgaggaaaaaaaaaaaguaacaguaacuacuguuucucugcccuccuauuccaaugaaaugucauaugcauaugauuaauuuuuuaaauagcuuauggaguauaauuauuuuugaaagcuaauaauguguaacauuuucuuuauaggcauuugaagauauauauauugaucagcgaaagacgauuaagacgauguuggaauaugcugacaagguuuucacuuacauuuucauucuggaaaugcuucuaaaauggguggcauauggcuaucaaacauauuucaccaaugccugguguuggcuggacuucuuaauuguugauguagguaucguucauauuuuugucucuguucaagguagcuugucuuauuuauauucaaauucuacaauagugagucucagaccacuauguuauguugacagacuauaauaaccacuaaacgcauauaugcaaugagagugucauuucuggaagacaagggcuaauuuaauucugauuuaaaauaacauugggggauggaaucuaugguaguucucuaguuaucugagaaagcuaaagaaaaaacaacacaucagcaguuuguagggaaaguagugaaacagggaacuuaaaagguauguugcuuaaauccuuuauguugugagucagacagacucaaguuuguaucccaggaccaucacuuguugauuuugugccacugaguuaguuucuuggccccaaacucuugacccccaacuuguacaguauuaaaggcacucaauaaaaacagugaugcuguugggugcuacagucauuuaaaaaaauucuauuugaucuacucaaacuuuuuaaagaguagauuuaaauaguagauuauauggauuaugacuucauuauaggaaguaagguauguagaguguagggaaagagaagucuacuuuauucagcagugaaaguuuuccuagaauguaaacuagauuuacggcaagcccaaacagcccuuuauagaauuuguauccccaaugauuaauacugcauuuacugaaaacaagugacugacuucaagauguguuaaaguuaagcaucauguuuucuauuaucaacuuggcaaaauuucagcuuuagaaagcuacagcaaaacuauccugauuucauauugaguaguuuuaccccaaaaagauacuaacccagcaagacuaugaggguuucuuguggaaaguguuucuugagcuaagaaucaugaaugcauuauauuuccuugacccugaacaaaggcaaaacuaagcuauuuaaaaaacuuaacaauguuacugugaaaugagccaauugagagaaaucucaaaggaagaauugcuuuaucacaucaauaagggagaaaguuuguaauauugagguuucaagcauuagaaguuacauuauguuucaauuucagaauuguuuacacuauaauuuaaaucuaaauguaauuuaacccuuuaaaacuuccugagguuuuuuuucuauuauguuuauuacacaucagcuuuuucaugaaaguuuuuuagugucauuuuugaaacauuuuaagaaaauaauuuuauagaaaauuuuguaguuuguaacaauaauaucuuuauuuucaauguucuguuuuaauucuuuaaugaagaucaguauagcacucuauaaaaggacuaauuacagcacaucucaaauaauguaagaaguauauuaaauaugauacaauuaauacauuuuaaaaaagaaaaguuuacaaaaauagugugcaguauaugcggaauucuccaauacuagcaucuuucuaaccaaauaaguuauaaucuuccuugaauacaaaguuuuaguaaauuccuuauuuagagaauuagauacguaagauuuuuccuuuagucauguauauuaccuacaaaugaauacaaaugaaguaaauuuauugcuguguguauuugguaaauauucauugauuggcccuuuggggccagauaucauggcagaagccauaaauuaguauaaaaaauuuugaggaaguuuuguaauggaauuucuuucuaaguuacuuauguaaaaauaaacaagugaaaaugcaagguauuaccaagacaaaauaucaccuucaaaacugauguaguucauuaauuucugagaauaccaauuaugauuaguugaauauacugaugcacaguagaaacuuccugcuuuuuuuaguacaacagcaguuuuuguauuuuauaacuagcuacaagaaaagccuuaaauucaacagcaacuuaauaaaauaaaggaagaauagccaaugaauuuuuuuccaccuugauuucuucuuuuauuuuacuaauuuuuacuuugcuuuuuuuuucuauuuauucaguugauaaauuauaugacauuuaaggauuuuuuuucaacuagcuuuuaauuaauguccuaaaaauuacauccuuuacaucaaacugaaauuauuucuuuaauuuuuuaaagguuuacugaaaaugucugaacauuuauccucugaauaauuauaagcaaaaauuauacuuguuguauuauauagcaacuacacauugaaugaugauucuguuuauuaauuguuauuauuuuugugugugcagguuucauuggucaguuuaacagcaaaugccuuggguuacucagaacuuggagccaucaaaucucucaggacacuaagagcucugagaccucuaagagccuuaucucgauuugaagggaugaggguaagaaaaaugaaagaaccugaaguauuguauauagccaaaauuaaacuaaauuaaauuuagaaaaaggaaaaucuaugcaugcaaaaggaauggcaaauucuugcaaaauugcuacuuuauuguuuuaucuguugcauauuuacuucuaggugauaugcaagagaaauaggccucucuugaaaugauauaauaucauuuaucugcugugcuuauuuaaaugacuuuauuuccuaauccaucuugggaguuuccuuacaaaucuauauacaaaaaaaagcugaugcauuauuaaaguacuauguguaaugauauaaugguaaucuaaaguaaauucuauaucagguacuuauucuuugugaugauauacuguacuuaacgaguuuuccugaaaauaaugugaaucacacaugugccuaaguaugaguguuaagaaaaaaaugaaaggaguuguuaaaacuuuugucuguauaaugccaaaguuugcauuauuugaauauauucaagauuagaugguuagauauuaaguguugacugaauuuauaaaacuaguaauacuaacuuaaagauuacauacaaauccacaucauuuuuauaacaauaaaguaaaacacuuauaaugaacagaaaauauaauuuugacucauuacuauagguaauuuauacauuaaccuuaacuugcaucuuauuggucagagucacacaaaauguuauuuuauccuuuucaaagaugcaauaaucauuuuccaucaugcauaacagauuagaaauuuugccauuauugacuuauuuuccaugccuuuuuuuacggcaugaagcauuaguuuauagauauauaauauaaaaaauuaguucugcuuuuuuuuaaaaaaaaauauuaucaaaacaaaacacugaauugugugauuccaauagaaaaacacugcucuuucaccuccuaagguguaguuacuuuuauggaaacuaagcuguauuguagacuuccauuugcacuuuguagauuguuuauagccuuauguucucuucucaagucuuauuauaaaugucacuuuguaagaacguaggacuugucuucgauuucccuaacauauaugaaaacuuuguccucauuaucgacaacucagaacaauauaauacaaguaguccucuuuuauuucucacagagagccucaaauuuucaccaaaauguuaacagaaauuaucucugggguguauaagaauuaagucuguuuuccaauuaaaugucacuuuguuuuguuucagacuggcaguuucaguucuggagaaaaaaaaugucauuuguguacauucuacuugaaaacauguugccugaaucaaaauaauauauuuuauauggcuugugaaaucugaacaaugcuaaacauuugaaaauauuauaaaccuuuuacauuugaccauuugaaaguuuauuaaauucauuggucaagugcucagauauuuccauacauuacacuucauuucuauaaaaaagcugaucuuaucgguauacuuuuaauuuucucagaaauaaccauaucuauaauuauuaaucaauaaugccuuuuauauuaaaagagguuaguuuuugaaacuuggaguuuuagacauaaaauccuuauaaaugcugauagugauauaacuaauaguuuaaauggucagauuuaugaauauggcucuauuccucauaaugacaacauacacacagcacuaaaaugacuaaucucuucaauacguguuuggcauuguagagucaaaauaacguuauaauugauucuauuuuuuauacuucuaguguuuggauauuuuauuuuguaaaaauauaaucaugaaugauggugagguuggauauaagaaugaugauuaugauugggaagugagauuugaacaugcucagaaacucucauuuaauucuuugcccuagcagcauaaaaucacaauagcugcgucaaagcguaacucaggcacucauuuuauuuuuguuguucuguuauuuuuucaaagcaugugcuuuuaugcaacauuacugaauaaagcauguuguacagugcuugauaagaaguuagaaaguaacaaauaaauuaucaucacguugcacuuuguguuuugcauguuuuaugcacauuucuggcugacagcuuuuaaacauuuauuguauuucaaauuuccaguccaaauuuuucaacuuguaaaauuaaacugagugaauugaugucgugaauaucuaggguaaaauaaaauuuguguuuaaauuuguauuuuuaauuuccuaaccuaggaaaucuuaaauaccuucuuuuucaaaagaacucaagucuuaauggauagggaaacagacggagagcaucaugaacaaaaaguaacaccaaauguucugucauaucagauuucuaacuaauaacaaacuauauauuucuauuuuguauaggauaaucuugcuccaacuuggaugggguggagcgcugguuccuccccugagcccuuuauuauggguacuguauuaccccuuuugcuaccuuuaauccuugcacugugacuuauguguaguggggugagggagggauugggaaggguacuauuauugcaccacaguagggaaaauacauuauuuacauccuaauccccucuuuucaauugucuuaaauuucauuugaaaaaaaaaaaaaccuuuaugaauuuacccucuguggauuuuaaccccaaugguugauaucuuuauuaaguuucauugaauaugauuuaguuauguguauauggaguuauccaucuuuggggagauuacuggauuggugagggcgggggacccugguguagaaugauuaugugaaaaaacaauuuaacuuguuaagcucaugauacuguuugaggcauacagccccugcuguuuaguacauuggucuggguccugaaaauuaccaguuagauaccaucaguugauuauugauauguaugagcagauacuagggugcaauauuucagguuucauaagacugguauugauugugaccacucucauuuuuuauuguguaaguucauaugggguuauuuucaaaauguuaacaaggcaaaaauauauuaagaaauaguugaauaagcacaugugaauuguguuguaaacaaaaaguuagaauaaaaaaauccacuuauuugaauuaugcagaauagaauacauaccuagaaauaaaacaaaaacgucuuaucaugaguauuaagauaaaauuuaaggcauaaacucacuucuuagaauaaguaacucccaacuaacuuucuaggauuuuaaaacauaacacagugaaaacauacauaaacauaacucuacauuuuauuuauucuuaaaguuuaaguguauuauacaagaagaagaguuuauauucgagagacagaaaaagucagaauuuuuguuuggaucaccaauauaucauagcuuacaaaaaaacugucuuaauuaaaacccacaacauaauuuuuuuagauuuuuaagaaagauucuauuauucuucuuuauacuuaaaaauggaugauuccuacuuugcccacuuuuauuuuuauucacauagauuuucuuuauuucuauuagagaagcacuagaauucaugaauaguguugauuugaaguucaaaguaauuaauucagauaaaaagacauuucugcauguaugaaaauuucuaaugugaauuugcauauuuaauuaucaauccuucauuuaguguagacuuauuuuuaaaaaugcagguaaugaaccagaaauagaauugguugugcuagaguagagaaacuuuauuugaugauuguuuugaaaaaaaagcuucugagaagaaacaaccucuaguacaguauuaauucauuaagauagcuccuuucucagacauuuccuuucauguagccugaaaguucaauuugaaauuuguucuuuccaauuuauucagacuaauucugccuacuuucuuccccccauaagaaccaauuacugcagcuuuauugagacugaaaaaaguuaauacaccuccuucuuugcugaaccaaggaauggcuuggaacucuugggaaaagacaaucuuuucuaugaucuuucauugucuaauuuaauacaucauaaauaugacuauagcuuuguauaauaaacuccccaauacugugccagauguuuucuaagauaaaguuauuuuauguucacaaaaaaaauaaaacuuuucucugggccaaauguaugccaacuuugcaaaucauauccugaagugcacugcugcagaguacaugcuugcgucauaaauuccauagaguucgcuuuaacucuaaaucaauccccaguuucaaaguaaaccucucaaacauauuaccuaagcacaaacuucucccugugcucaguuccuuaauuauucucaucccauauucagaaauaacauuuaaaaauuaugcuuugaucaauaaauacuaaucuaaacuuugcuucauuaacccauucauuuuugucaaccauuauuuuauuccuauauucaaagcucucugguauguucuuauauucaagacacucaaggcccuggaagauucacgaacauauguuugcaucuuaaauuuuuagaaaaucuuacaaucugucaggauuacacugaacucuaguacagaguaauauggguaccagauaagugggagcaacucuuccacguagacuggaaacagcacuaaaugcuauuuauaggcuacuuucugaacuuaacuuguuuuaaccucauuuuucucauaugccaaaugagaacgcaauacugaauuaucuguacaguucuguucaguacuagaauucugauucuugaauucaaaggggaaaacauuccucuuuauuuuggaggcuaaacugggggacaaaguuaggcuccaugaaagaagugcuauuugaacuaaagccuuuaagaggggagaguauuucagaagaggagcuauuagacaaggaauuucaauguaaauggcaucucaaucaccuggcaauuauauuagcacacgguuauuauauuaauugaaguggcaugaaguauagaugaccagggaaguuaaaacuggaaauauagauuguggagugaugugaauaccaagguaagaaaaauauuuguuaguuaccagagagccaauaaauaacuuucaagugggacuuggggaagauuaauucaucuuacauagauuaaaugaaggagaagguuaggagacagaugacagugcaaguaugaaauaacagagggcaguucuagguggugacugugagaauggaaaagagguggcaaagcugagaaacguuucaaagaaaaaaugugagacagguaaugugaaaagaaaaucgagaaauagguauagauaaucaguguucugcucauacucuaaauuggguguugaaggcaaaauacguauuuuaauuaguacucuguguauacacacuagaaacagcauuguaaucuggauaguggacaaaauauucagaaaagaagggaaauaguaacuugauuucaauuuccaaaucucuaaucugaaagaaaucuaauucuauucauccauuuaaaauaaauuauauaacgagaauuuaugaaguccauuguauuaaugcagacagucagaugagauaaggcaaagugucacgugucagcuugguaguugcaucggccacaucauuugguucugccuggauaacucaaccaaauuaauuuuucauacucauccccuccaccuuugucauuacugguauucuuauuuucuuuggcccacuuaucacacuguuuuauguuccccagaaggccuagaguucuuuacaggcuuuaaacagggaucagaaguauaagaaauuggcucauguauuuuuuuuucagacaggcaguuaaaaaaaauuguucuaaaaauacacuggcaucaaauggcaaauagaagauguuuugacgacuacuuccauuggaucagacugacaagaauaauacaagcacauagguggaauuaaacuuagcuauuaauguccaaguuugaggcagcugccccuuauaagcauuuuagggucuguuuuuagcuucccucuuagccacuccugugcagcuccagugggagguauggaggaaaaagcaaggaagccaucccuauguuguuuccaaacaugaacacucaagauuuuuaacuagugguccagaaguaaagagggggaaaacauccuucuauagaaaaaaaaaaaaguagauaauaauugaacacagaacuucaugugaucacaucagauuugagaacuauguauggcaucccucuuuuucuuauuuuccuaagaaaugauuucuauuauguuucauuugaaauaaguuuuuugaauuaaacucaguaaaugaaacaacugacaugacuggagcuugaaauaaacgaugugaugaucuaaugaaauacauaaugcaaauugucuugcuucuuaugcaaaaauuauuagucauagcaaugcaugaauaauuaaagacaauuauauuagguauuuaauaauauuuuuuauauuuaucaucugaauuuuuaaguuauuuuaaaaauauauuggucaaaucaacucagguccaaauguuuuaguuuuguucuuuaauauauugccuuuuuaaaaugaguuaaacuucuguauaggcuuuuuaacuuuucuuuauucugauaacacaauucugacuucaucuggcagcaaguuccucugauuuuccuuuuccuuuaaccuuuuaaugcuucucccucccuuuuuuuuaaaaacauuuuuguuucauuucuugguuauauugccuauaguuguuuuccuaaguguauugcuuaagaaaaaaaaaugaauuuuaagauuuuuuugaaccuugcuuuuacauauccuagaauaaauagcauugauagaaaaaaagaauggaaagaccagagauuacuaggggaauuuuuuuucuuuauuaacagauaagaauucugacuuuucuuuuuuuccauuuguguauuaggugguugugaaugcccuuuuaggagcaauuccauccaucaugaaugugcuucugguuugucuuauauucuggcuaauuuucagcaucaugggcguaaauuuguuugcuggcaaauucuaccacuguauuaacaccacaacuggugacagguuugacaucgaagacgugaauaaucauacugauugccuaaaacuaauagaaagaaaugagacugcucgauggaaaaaugugaaaguaaacuuugauaauguaggauuuggguaucucucuuugcuucaaguuguaagugaacacuauuuucucugaauauuuuuauuguuuggaauaauaacaaaauaaugacauacaucuauuauuuaguuccuaagaaaaaguauauauuucuuucuauuuaaaaaauuucaauuuguuaguacaaguuuaugagcccagaugggugaaaacuuuauuacauguaaggacugcagauauagucaguagugaccagaccaaacaaagaccucuuugucuuuuuucuuguauuuucuuuguuucuauauugcucuuucuauauaaacaaguaaauuaauaaaucaguaacuuugccauuuuuuauugugauuagaaggcuuguuucccugaucagcuaccaaaacggaauacacuuaacagauagaucaucuuccaaaacacauacacuuaauacaccuaauuggauuguaauuaauugguagggauuaacugcugcugaguucuauuauuuggaucaaaguuuggggaaugacauuuagguuuuagaauuagaaccaggcauagcggugggugccacugcacuccagccugggcaacaaagagugaaacuccaucuaaaaaaaaaaaaaaaaaaaaaaaaaaagagagagaauuauaccuggaagcaacuagaaacaaaaaugaagcaaaagcagcuguugucuuaucucaaaugaccuuucagcaccauuauuuaagucuauuuuguccuaaauauuaauguuuucacuacugggucucuaagacugggucuccaagaaaaauaguuuauaauuuauauuuaaaaaagguagcccuuuaaacauuuucauuugauucugcuucuagcugcagcagcaccacaacaaagcagggaauaaaauaagaguccagauuauuugaaaacucagcuuaaaaaaaaaagacuguacaauuucuuucuucccuugugguucuacagugucuuuagggcagaaaucaauuuuugcucaccaagguuaugauuucaacuguucaaccagaagacuaacuaagcaaacaaaccaacacuggucaaaacccuuuugcagcucuuccagaggugucaacuaugauuacuuuacaaauucuucccaccuuuuuguuggaaauucuuauuucucuucuuaacauuuuugaucuacucugaauaauauucaugcaauuaaaauagagauuuuuuaaaucugguaagaacggguggggcaugguggcucaugccuguaauccuagcucuuugggaggccaaagcuggaggauugcuugaggccaggagaucuagaccaguggaggcaacauagugagaccuugucucuaaagacaaauaaaaacaaaaguuaaaaaaaaucuagcaagaaugcuuucuuuaaaaauugucgacacaugaugauauuuauuugggcacuuauucuaacccuuaacuaaugaccauacuuguaaauaucacuaaagcaaccaccuccuccauaaauuugaggaaagaaaaauuaaaaauuuuaagcaauccuuuaaaauguaagcaauucugaaaauacagugaugguccugcacaaagcuauuaaauaaauucugccaccaaaaaaaaaaaaaacccucuaaaauacugcuucacauuuggcuuuuauagaaucaccucucuauugauuaguaagucauugaaauggucccuugaaucacuuuuuuguuucuauaccaaguguguaauggaauuguucuaucauugaccuaagccacugacauauuuaacacaucucucucucuuucauauacaaaagccuuguacuuucuagcuaggaaucauuacuuucuuuucacugcugucacccacacccuugcuuagcuuuugucucaugaaauccaccaccucacaaggguuagcguuaucagaacaaagauauauugugauacagacgcuaaaggcuuugcuaaccucccucacuagcuaagggauaauccuuuuaggcccacaggacucaaaauucaugccccaggacaaguaacaaauuacuguaaguuguuagccugaguauccuucauccugugagugccaagugucugcuguacuauuguucacauuucuuauucauauuaacuuauuaucuucaagaauuucagaaagaaaauagaauaggggguuauuucuaaauguuuugaugcaaaauucuuaaaaggauuguauuucuaaauguuuugcuccaaaauucuuaaaaggauaguugcaacccugccuuuauguauccugguacuauccuuacauuguuacaauaaagagaaaucuuaaauuuucaaucacuuugaucacccugcagauaaauuuuagcagaugauccuuagaucuaaguuguaauuauuuggcugauagagcuauugacccauguguuggcauuuguaagacuuucuaaaaagugcuccagcaaauuuuaauacugcuuuaaauaucaugacaccaugaacucuaaagaauugaaaagugcuugugaguugguuaucaaggggaggauauaucaaauggccauuuuguucaauauguguucuagaaaugaaaagccauacuaaaauacugucuugguccaaaaucuguguaaaauuuguuuugaaaugucuuucaaaaauauucccuuuugaaaauuauaucaguaagaauauuuauuaaacaucaggucuaaauuauuuuuacuccaaaguaaaacaugcauguccuucuuaauaggccacauucaaaggauggauggauauaauguaugcagcaguugauuccagaaauguaaguauuccuuguauucuaagucuuuuuacaauauugaucaggugguaaaauuaaucgaauaaagcauaaacgaccaaaugaaaugauucuaucuugauuuaaaauauuugggaaaaagugugacagguaaauauucaagcauagcaauguuuaucagaaagaucuuacuaagauaauucaacacaugaauuauuuugaaaaccaaaguaacaaauucauguauuuaguaacuaacaaauauuuuccuuuuaaauauuuucuauuuuguuuccuauuuauccacacauuauauaauuaguaguaauuuuagugugcgggaccaaauuugaagaaauauaugauuucuaucauuaguugaaauguauagucacccuccauauuagacagcaugaaaaguuauggauauuguucugucagccuuagauuacugugaugauuucuuucaaauaauccuauuuuaaaccauauaaaagaauguuuuuauaugauuuuugcauucauaaauugacuggagccuuuacuaauguugcaaucacuucugugaccaacagauuccuuuaaguguauaucaccaaaauauaaaccuauuuuauuugauuucagccucuuucaggcuccaagaccuaaacugaaauucaugcucauuccaacuuugcucuucaaaacuuuguaagauguaguauuuucuaucaaccuucaucuuucuauucucaagucccaucuguuuaguuuaucaucauaaagaauaaccucugucccugcagucuucaaccugauagaguuugauguuaucuuucuugaagugcauuucaaauagcuuuaguuuuauguugaauaucauuuugauaaccuccagaguuguuuuauuucacuuugucacuuauauuuuguuuuguguguuuaguugguuuuuaacuuuguugcuuuuagaaggacaugaaucuguuaaaaaacuauagugaccuuucaguccauuacuaaauuauaaguaauagcccauuuguuuuaagcacaaucuaggaauuaaauaaucaacugaggauuuauaaaauggacuguccaucuaugucuacuuaaucugaaaaauucaauaacuguuacuuuaggguaaagugccaaacaucugaaugaacaacucauuucuuauuugcuacauuauuucaugcauacaugaaugacuguuucuaaaccuagccuguagauauuuacaguuuuaaauuuuuuauuaauaauuuuaaaauuacuaaaauucaguaccuuaaaagcuugcaaauuuagcacauuacuguucaaauggaagaauauuauuuguauuuauaguuauaaaaauagauuuuagaaugucauaauagccauauuuuucacaugaaaacaucccuaaaggccaauuucagggauguuuuuuagagguaguugauucagaaaaaaaaaaaaugcugacauauuaguaagaauaauuuuuucuauuguuaugaaaaagcaccagugacauuuccagcacuaaaauguaugguaauauuuuacaaaauauuccccuuugguagguggaacuccagccuaaguaugaagaaagucuguacauguaucuuuacuuuguuauuuucaucaucuuuggguccuucuucaccuugaaccuguuuauuggugucaucauagauaauuucaaccagcagaaaaagaagauaaguauuucuaauauuuucucucccacugagauagaaaauuauuccuuggaguguuuucucugccaaaugaguacuugaauuuagaaacaaaaugggaguauauauuauaacugauuuuuccuuccucuuccucugucauucacuauccauauauuuccggcuauagaaagcuaagaauaacuguguuccacacucuuguucauagguucauaaaguuuuuccuccucuuauucauuaucaagaaacauuuucuaucuuuuaaaaaauaauaauuagaauaaaacuagaaagcaaccgaauaugccucuuucccaaaagcaauuuguuacuuuaucccuacaacuacccacucccccuugaaaauauauuuuccaacuaauucuuugcaauaaauuaggcacuggauguaagcuucuucuaguguuuauuuuuacgcuuuuuucugucauugauuucuuuuauauauucccauuucuuucuccaagauauuuaaauacaagcuauccguuucagucuugaauuguaugacuauuauuuaucauuuauaaggcucauuugauugucccaauuaccuauguacauuauagaacauauggaaaguaaauaaauaucaucacuuggaaguaacugcugccauucacauuuuguuuucuguucagaguauuucugcacauacucuuauuguuguacuuuuuaucuauaauuauaaauuccacuuuagacuuaacauaaguauuuucucauuuuguuaagucuucauauaugcauuaucauaauuuacuuauucauuccccaguagguugauaauuuagauuguuuuuaaucuuuaaugauuuaaauaguaccuuguugaaaguuuuguacaaaaaaaaagagagagggacagaaaauaaggcuuuaauuauuuccugagaauaaauucccacaaugaaguauuuuacuccccuagaguaauauaacuacucaaacucccaauaucaguguaugaacacccaugccaccguucccucacugucaccaaacauucuguuuuugaauauuugauauuuaauaggugaaaacuguauuuaauuuuaauuuuuaugacuuuuauaaccuuaauuguuaugacuuuuauguauuuuauuacauuugaacauguucuuaaaugcucauuggccauuuguauuucuuccuuuauguacuguugcuucaucucacuuguucaguagguuugcuuuuuguauaaugaaugagugcuuucuuagacuacagaacauucuccccucaauucccuuuucuuauuaccaguaguauucuuaagucaauaucaggcuacucuauuucacuuacuugccaguguuccaaucuucuaucccuacuggucugucccauacuuacuaugcuaugagcucugauuuauccccuaaaucucucacuaacucauccaguuuucuuuuuaucccuuuccuccaauucuugacagaguuagagugacuuuuuuaaugaguaacuccaaacugucuugcaguauacauccucuaacucuuugcuacauuuaaauaagaaaauuauugccuuuaacaucauaaagguaguauguauaguauaagguaccaaguauuuauuaucucagugaaccaaauuucgccacucacuaagcauaaggucuuggguaaaauacuuaaccuuuuugagauuuggggguguuugucuucauaagauaauaauaauaaagucaauuuugaauuauuuagggaauuaaauauuaucauaccuaaagaguacaauuuuuuuuacauuuuaaaucccagauauaauuauacuaaucaguugaauuuuguauuucuuuuuuuagccauccauuuucuauuuuaacauugaaaaaaauguacaaaaggacacaguuuuaaccaguuugauuuuucuuuucuauacuuuggaggucaagacaucuuuaugacagaagaacagaagaaauacuauaaugcaaugaaaaaauuaggaucgaaaaaaccgcaaaagccuauaccucgaccaggaguaagaaguaucaaaugauaugggggaaaaauacaaaaacaaaaacuugcaugcuugucucacaaaaaagaaaguagcuaacauuuccaguagaaaaaauuucuuucacuuguagagcaucaucuaaaagugauguuuguaucuuuuaugauaaugguaacaacaaaaaaaauuaaagaccaaaaaagaacaagaagaaauagaagauacacccuugacuucaagagauuuagaagcaccccauuacaauccauauuaauuggccaauggacacauagacaaugugaugugcacaagagaaaguuaaucacacaacucaagaaugguugccaaguaauaucagggaaagaaguaaaccuugggauggggcuguaagaaaugcaauuuccuaauauuuuaagaaaugaaguguugagugaaauaacaccuuacuucuauuuuauuuuucacuagagauacuaaguguuuuaaaggaggaaagaauuccaguaucuacuauucauauguauggcuauagaguuagguauuacuaaugucugcagaagucagggucaguaauuacaguuuaugaugauaaauaacaauacucaugcuuccaugaugaaauaaacaaauugcuaugaaaauguacagcuauuaucccacacuauaaauauuuuuaugaugaugaucugagagguuucaguaauuccuagggugcaucaaggaaaaaacuacuagcaaauauucauauugugaugauugaauauugccuuccugagaaugaugagaaauauauacuuucuccauuaaaauuuagcacuaagaguagaaaugaaacaacaauuuaggaaaaauauaaguuggaaaauucccucagaauuccucaguggcccaaagaaauaagccugcagauggccuucagugacuagcaguggcagaaaugggaagcagaaucacagaucaacgacaaagaacgugaaguuuuuuuugacauaaacauauaggaaaugucauucuggucucauuauccuugugcaguuucaggauucugugucugacaauguuagccaaggcuauuugguagaagaauaugaguauugccauaugugguauuuaaaugcauaauguuauagaugugucuuggaaauuccaaauucuccuuaacaauuauuugagaauacaacaagugaaauauuaauaguacuauauuuuaaaauggauguaugguccagcugaucauuggaaagucuugaaaaaaaaauuaaauggguuucuuaccuuuucauaaucuuaaaauguugauauguguugcauaccucuggaagaaguauacaguguugaauguuucuuuuguuuguuuguuuguuuguuuguuuguuuuuaucagaaaccuucuuuggauaagggauuguuauucugagaaauacacauuaguaaauggcaauuuaaauaacuaaauuuuaacaauuaauaugcuauaaaucauucuuacaaaaaucagggccaaugacuacuuugcaagaaacuagaaagucaauuaaugcagaaaguacuuaaugcuaaugcacaugagaaaacuccuuuguuguuaaaagcauuucuauuucucuacagaacaaauuucaaggaauggucuuugacuucguaaccagacaaguuuuugacauaagcaucaugauucucaucugucuuaacauggucacaaugaugguggaaacagaugaccagagugaauaugugacuaccauuuugucacgcaucaaucugguguucauugugcuauuuacuggagaguguguacugaaacucaucucucuacgccauuauuauuuuaccauuggauggaauauuuuugauuuugugguugucauucucuccauuguagguaagaaauauuuaaaguucuuaaauucaguuaaauaaaagugaaagcugaaacaaucaagauuagauucaagaucaucccagcaaucagagauaaucacuguaaauauuuugauacauuuuauccaaguguguuuguuuuuuuaacaaaaugucuccuacuauaugucaguauuguuucuuauucuauccauuuagaacaauauacuuaguguaaauguaguaaaaccucauucauuugaacuagaacugugcuauuaacuaaaauaaaaauguuuuugacauguugagauugaagaaccaauauaguaucuagaugguucuguuaacaagacuagaaauguagucugguacucacgaaaauugcuuuagagaauagacauggagucaccagcauauagauauuaguggaaagugguuucaagauaaggaaaaguauugcauaaaaagagaauaaagacaaggacuaaacauuagcaaaugcauauaguagguucucugcaagugucauguagagauuuucuagacuaccuuaaaaauggguuuaucauaaugaugcacaagggaaauaagguggcaugggacaucaucaguacuauacuucaaagccuggaacacauaacuagccucaugagcaauagcucauuucauuagacaaaacuaaagcucuaguaaaguaaaaagcaucugucugugggccuauucauucuucccuaaacaggaugauaugauugggucaauauuuuacuauccaaaacgaggcaccuguguuggacagauuuucaugccacuccccucucugaagaaacuggccuuauauccagcucauuguauauagccuuugauucccacuaauuauaauccuugguuauaacuaguguggcuaagguauaaaaguuguauucucacacgucuccuucucucucucucucucucacacacacacacacacacacacacacacacucuuacacuucgucuuuucagaaugaggcauuuaaacuugaaggcauuuaguuucuugagcucuucuuuuuaacuuuacaaguauuguuuuuaucuaaaaagcaaauggagagagaagcugaaaauaagaagacugagauuacaguguuagguacaggagaccaaaaagaauugaaauacaacauuaaguacaggauacuaaaaagagcaucaaccugggauccuuucagaaaugcaccagaacauacauaaaugaguauauaaaaauauuagaguggaauuuaaguaaguaccaagaucauggggagaugaaaguagcaucaaaagcuaccaauacuuucagauggaaaaggaguaaauagagaauuuagaauauggcaauuucagaaaaagucacuguauacauauaaacuuguaccuauacuguugggcugcuacuguucggccaaaugugcauuuuuaacuuauuuucuuuuuaaauucugacuugggacuuuacauaaacuaaaaguaguuuauaaacaucucuuaaagauaaaaaaaaguacuauaauccuuauaauugaaauuauugcugaauuucaaaauuaagauuuauaauauauuauguacaauuauauauauauuauauauaguugucauauuuaauauaacuggguucaggacucugaaccuuaccuuggagcuuuagaagaaacauauguuuauuuuaacgcaugauuucuucacugguugguauucucauuguuuauucauagguauguuucuugccgagcugauagaaaaguauuucguguccccuacccuguuccgagugauccgucuugcuaggauuggccgaauccuacgucugaucaaaggagcaaaggggauccgcacgcugcucuuugcuuugaugaugucccuuccugcguuguuuaacaucggccuccuacucuuccuagucauguucaucuacgccaucuuugggauguccaacuuugccuauguuaagagggaaguugggaucgaugacauguucaacuuugagaccuuuggcaacagcaugaucugccuauuccaaauuacaaccucugcuggcugggauggauugcuagcacccauucucaacaguaagccacccgacugugacccuaauaaaguuaacccuggaagcucaguuaagggagacugugggaacccaucuguuggaauuuucuuuuuugucaguuacaucaucauauccuuccugguuguggugaacauguacaucgcggucauccuggagaacuucaguguugcuacugaagaaagugcagagccucugagugaggaugacuuugagauguucuaugagguuugggagaaguuugaucccgaugcaacucaguucauggaauuugaaaaauuaucucaguuugcagcugcgcuugaaccgccucucaaucugccacaaccaaacaaacuccagcucauugccauggauuugcccauggugaguggugaccggauccacugucuugauaucuuauuugcuuuuacaaagcggguucuaggagagaguggagagauggaugcucuacgaauacagauggaagagcgauucauggcuuccaauccuuccaaggucuccuaucagccaaucacuacuacuuuaaaacgaaaacaagaggaaguaucugcugucauuauucagcgugcuuacagacgccaccuuuuaaagcgaacuguaaaacaagcuuccuuuacguacaauaaaaacaaaaucaaagguggggcuaaucuucuuauaaaagaagacaugauaauugacagaauaaaugaaaacucuauuacagaaaaaacugaucugaccauguccacugcagcuuguccaccuuccuaugaccgggugacaaagccaauuguggaaaaacaugagcaagaaggcaaagaugaaaaagccaaagggaaauaaaugaaaauaaauaaaaauaauugggugacaaauuguuuacagccugugaaggugauguauuuuuaucaacaggacuccuuuaggaggucaaugccaaacugacuguuuuuacacaaaucuccuuaaggucagugccuacaauaagacagugaccccuugucagcaaacugugacucuguguaaaggggagaugaccuugacaggagguuacuguucucacuaccagcugacacugcugaagauaagaugcacaauggcuagucagacuguagggaccaguuucaaggggugcaaaccugugauuuugggguuguuuaacaugaaacacuuuaguguaguaauuguauccacuguuugcauuucaacugccacauuugucacauuuuuauggaaucuguuaguggauucaucuuuuuguuaauccauguguuuauuauaugugacuauuuuuguaaacgaaguuucuguugagaaauaggcuaaggaccucuauaacagguaugccaccugggggguauggcaaccacauggcccucccagcuacacaaagucgugguuugcaugagggcaugcugcacuuagagaucaugcaugagaaaaagucacaagaaaaacaaauucuuaaauuucaccauauuucugggagggguaauugggugauaaguggaggugcuuuguugaucuuguuuugcgaaauccagccccuagaccaaguagauuauuuguggguaggccaguaaaucuuagcaggugcaaacuucauucaaauguuuggagucauaaauguuauguuucuuuuuguuguauuaaaaaaaaaaccugaauagugaauauugccccucacccuccaccgccagaagacugaauugaccaaaauuacucuuuauaaauuucugcuuuuuccugcacuuuguuuagccaucuucggcucucagcaagguugacacuguauauguuaaugaaaugcuauuuauuauguaaauagucauuuuacccuguggugcacguuugagcaaacaaauaaugaccuaagcacaguauuuauugcaucaaauauguaccacaagaaauguagagugcaagcuuuacacagguaauaaaauguauucuguaccauuuauagauaguuuggaugcuaucaaugcauguuuauauuaccaugcugcuguaucugguuucucucacugcucagaaucucauuuaugagaaaccauaugucagugguaaagucaaggaaauuguucaacagaucucauuuauuuaagucauuaagcaauaguuugcagcacuuuaacagcuuuuugguuauuuuuacauuuuaaguggauaacauaugguauauagccagacuguacagacauguuuaaaaaaacacacugcuuaaccuauuaaauauguguuuagaauuuuauaagcaaauauaaauacuguaaaaagucacuuuauuuuauuuuucagcauuauguacauaaauaugaagaggaaauuaucuucagguugauaucacaaucacuuuucuuacuuucuguccauaguacuuuuucaugaaagaaauuugcuaaauaagacaugaaaacaagacuggguaguuguagauuucugcuuuuuaaauuacauuugcuaauuuuagauuauuucacaauuuuaaggagcaaaauagguucacgauucauauccaaauuaugcuuugcaauuggaaaaggguuuaaaauuuuauuuauauuucugguaguaccugcacuaacugaauugaagguagugcuuauguuauuuuuguucuuuuuuucugacuucgguuuauguuuucauuucuuuggaguaaugcugcucuagauuguucuaaauagaaugugggcuucauaauuuuuuuuuccacaaaaacagaguagucaacuuauauagucaauuacaucaggacauuuuguguuucuuacagaagcaaaccauaggcuccucuuuuccuuaaaacuacuuagauaaacuguauucgugaacugcaugcuggaaaaugcuacuauuaugcuaaauaaugcuaaccaacauuuaaaaugugcaaaacuaauaaagauuacauuuuuuauuuua

SEQ ID NO: 6 - RNA, 84480 nt, Homo sapiens; identical to SEQ ID NO: 4

SEQ ID NO: 7 - RNA, 84480 nt, Homo sapiens; identical to SEQ ID NO: 4

SEQ ID NO: 8 - RNA, 33620 nt, Homo sapiens
ucucggcugccgcugcugccguuggcucuuauucuccuccuccuccuccucucuccuccucucugcuucucucugcuccucucuccuccucucuccuccuccuccuccuccaccuccuccuccuucucccccucuuucucccccucuuucucucuucuuucucccccguccccccgcccccuccccccaggccugaugagcaggucucgagccuccauccaucgggggagcauccccgcgauguccuaugcccccuucagagguacgugguggggggagggggagggccauauggggggcaacagggggaggggcagggggcgggggagagucggggccgagggaagggagcggcugaaauggagggagaggggaggaccgggaaggcaggggugggagcaaccgggaaggagggauuggaggccagagggauagggguagauaagggauggaggggccaggaaaugggccuugaaagggggcugaagggaaaaugaugaaggggaaagaaagcgccagaaaggggugggaagguagaaggauuggguuggggaaaaagcugcagaaauaauuugggggugggagcugagugaugaggaaaacaucaaggaaauagagggacagagucuugggagaggggcuaggaaggagaaaugaaaacauaggggugaaaagagaagccaagaagauguggggggauaauuuggugggggacucagaguaugguaaggggcggaaaaagagaggaggauggagggagagaaggggccagauggagagagagggaggcagugggggguggggggauggaggguccagauggagggaagagagaagagagagggaacggugggggaggggagaccagggcagggggagggccaaauuaugugugcuuggggggguggcaguacaaguaagaugaaaugaugggaguaggggacagguuaggauccugccccagacucugacccucuuaaaggcucuugaccaguaaaauguaaccucuggggucuuaaugcugucuucacuucaucacuuuuacccccuucccccaccccuccaauccuuauuuccauucccccucccuccucugcuguccaucaccuauaucuuuccccccauaugguguccguuccuuauaugagucccccuucuguccuuccccuauaucaguccccucucugguguucauugccucucucuuaucucuuuucuauguggucgcucccuuauaucucuaucacuucuuuacuaguccgucuugaccccuucucauagccuccgcauuaggucugccuccuuugcucugacacauguccagucgagcccuucagguguauucccuugccccugggcauuuaccaucauuucugccuccuuuucuaucuacuccuauuauuugucucccagaccauuccuugucaccacaagucugugccuacccacuuucccuuaauaccucaacucuuauuaucauuucucuuuucuugucuccucuacuuauugggguguuggagauuugggguacaaagacacagguuuugaugauuagaacaagggauccccaucucagcccuugagggauuucucauccuaguaaaaauuucccguuucucagccauguugcucugccucuugcaucugccucccagaaucauucuucaccaaguccagacaguauguguguguguguuucuagaguuguuccuaaguucccugcugccaggagaaagaugcccucugaagucuaacccgccucccuuggcugcagccugaaccagcccuuuccccaaaugcuuauguguaucaacagauuucuccucuggguauaccaagugucuaagugcggugggcauguugccugcaaugucuguaguuucagaggcuagguauuggugaucucuguaucuagagaacauuaguuagucucugagauggguugagauagaguuucaaaguaugugguuucuaaaugguggacauucugaggguucaucgcucacugugaucuggagguuggguaaauuugagagacauauuuauagacagaaaagggcugaauuugcaaaacucugcuacucagugcauucuguuggaaugaagcucaaagaccaguucuccugcaguauacucaugguuaucccauaaaggugacagaguuugaucuuuuuuccaucuaaaaucugauaccuuaagccuaauuucuagcucuuugcugucgccaaugugacaucucucuuacuucaauagggccuguguggcauugggguuuaaaggagaggcaguuugcagggagagcggcauggcaagaacaacagagcuggggaaggaggacccuggucucaucucagccauaggcgacacuuggucuacuguucucucuucucaaaguuuuguucccaucuccagcucuugucuuuggaggccccucugugucaccaggccuggauauuccauucuuucccccugacaucuuucuuccucaagcuccucacugugccuugagaaggcuccugaccuauggaguggcuuccauccuguccacugagacuagguggggugagguggugggggcaguguugaaucucugggcacugaaugggagaagagauaaauuuggucucuacuuguccaaacaagggcauauuucccaccuucugcccuggggccuccacagccagaugccgacaaaagccaucuucuccuuaccaccagaagaaccagaacuuucccuaaaggaugagcaggguugaacuaggggaggagggcacagaggagggaagaguugggaggggaggcccucucaugucucugacugugaacagguaagcuccccgacuucuucuuuucuagauauuuagcccucagaaucucaugaucccaauguuccuacacacacaccccauccuucuuucccacagccauguagcuuuccucauacucuuuuauagagggguggugccaccuuccaaguccuugucuucugcagcuauuuggaugccuuccucuacccagauaucugacaccaacuucucuguuuuucuccugccaauuuugcggcaccucuaccuuauuuuccugaaguagauggagagcuccuucaucuuucucugcccccaaacguguaccuucucugucauauaauucccaucccugaaccucugcauuucuucccccaagucuccagagccuucugugaugugauccucuccucuuuuccccuuuguauaaaugcuugucuuguguuccuuuagaguugccaggugucucacuuucaacugugaucuccugaaggccgguaggguccccuucucacuuuguggacucucuucuugccauuuuaggccucugcuuccaaaugcauagagccucccuuacuguuucugugugucucuguccuccagauguacggggacccucuaugcaccgaacccaauacguucauuccccguaugaucguccugguuggaacccucgguucugcaucaucucggggaaccagcugcucaugcuggaugaggaugaggugaguguggugagaaggcugggaaaacgcaugugggagaauggggagaguccucauuagugaaggggagagagacacaaagaaggcagacaaagaagaaacauuugcaaauggcaggaggguggccauugagacuuggguuggagugugacaagagggguagucauucucucaucuugggcagggagucuuugaggguuaugagcuguguuggggaggagaugugguucugaagauuucggggguggggaggcuccuguuuucacacuguccauauuguaggauagguuagaauggggaaggggaacugaaggguuuggagaaggggugaagacauggaaggcccucccaaccaaagcaauccucaggaccccucucugcuuugcccacugagcaagacucccaguccuuucuccaucagggggcagagugcaagaagagaaauugcaggacgcagagaaaaggcaggggauagaggagguuuuagguagcuggaggauacugggaaagaagacugaggucaguggaucuuggcaugauggggugaagacugggagagugauugagaucaagguuuagagagacacugagagggcuucugcaagggagugguuggacaucaggaaggaauauaagggaggggaacugggaguauguggaguuaucuaaaggaguacaaguggaguaggggcagggacuagccagaguaaaggagaugaaacggacagaggccucuuaugggaggugguggccagguauggagaucugagagccagggaaguguggguucugauuugggagcugggucagcaggaguguccauuggaggaaauagaggauaaaaacuggaauggugccccacaagugugagucagggaaugggggugauuugggggacaagcuuuaaaaaaugguaggguagccuggaaaaccaaacguggugagagauggacccugaaaguuauugggaauggugugaugaggaaggguuagaauuugagucagggcuaacuagagugucaagggaccuaugggggcaggugagaguguggagagauggcuggguagacagcuuccaggccacagaguaaaguagagguguuaaggagaggauauggugacuuugaaaggagagguggcuuggggagucuaaguuuuggacaccauugggagacauuugagugacuguggucaaaccccuagaucaagguuuggagucuguaggagaaaugggggaaacuggaacccagaguggggacuguuauagggaugaagagggaagacaauggauugggguaaugaaggaaugacagagauagggacagacugaagggaccaguggccagcaaguugaggggcaauaggaauggccggucuggagcaggaagggcgugugugugggaggaggaguagauagaauugggaaaaugagcagccugaacagacgcagggaguuggaauuggaugggugguggaacuggggcugggggauagugaggggucuguuccuguggcucuuuguagagguggaggagacugcagggguggagguguauggagguagggauggagguggacagggggagcugggugugaagcuuagggaaaggugauggcugaggggaagaagggaacugagagaugcugggucgggugauggaaggagaugaaaggugggggaaggugaccaggcccucuggcgggaggggagguugggucccagucuggccgcaagccgggccgugggagggagacaagcuguggauccugauuauaaaugcagcuucugcuacccccgugacaggcucggagggagagaaggggguaagggaggugggagguugggaggaaagcagggagaauggaggaacugaaggucaagggaaaacuggauucaggaaguagcuaacuucugaggaguugcagaagagcugaguaggguuugggagaauucuccggaagguguuucaagacaaauggagggagaaaagagggugggacggcaaagaaugagagagagagacugggggagagaagggagagauccagucaccaaguguggaggggccggggcagaaaaagugggcaggcuuagggggaaaaggaggcccgcccuuccugggaggaggcggaggggggaagagggaggggaggggcggcgugggccagggaggucugacacacccccaccuccccuagauacacccccuacugauccgggaccggaggagcgaguccagucgcaacaaacugcugagacgcacagucuccgugccgguggaggggcggccccacggcgagcaugguacggcggccgagcaggcucucaugacccggacaggcgcggggagagggcugaagauggaccgggcuggcggggcgggggcgucggggagcggcgggagcuggccgggggcgggagaaggcggagacaaagucuugcuucccgaggggagauggcgcccuccucuggaagguggagcgggacaggggcugugggugagaggccccuguggguccucgcucggcuucgcucccuuucuccucuccagcagugaaguuugacuauuuuccuggugcuuguaaaaauagucuccuuagaucuuuagcuuccaguccguguguuccugccccugccccucccagccccuggucugggaucuuggaaagaaugaccuaguuccugcccuccccccagaccucuuccccaccccuaugcuccugauucuucuuccggaccuucaguccuugaggucuccuuuuauuacccccuguuuucuccucucaucagcugcuucuauuuucugcaauuguaucacccuuucucuuuccucccugauuucucuuauuuucuguaccccucuugauuaccccgucccuccccucugcucccggcgaaaguccaucagacucccaucucaucuccuuucugucuguagagcuaucugcgcggucugucucuccaacucucucccucucuccaucugucucuuccccucccucccccuuucugcccccccaacccccucuuuagucauuuaaaaaaagauuuuugucuuccugagaaguucgcuuaaaagguuuccaugggaacagugaggggagaugaaggcagagaacagagaucugcagccaaggugcagagagacgcccucagcccccggaaacccccucgucacugcccccuuccacuucauuucccuucccggaccuagcgauccagguuccccauuccuccaacccccaggugaccccuuuuucccaccagcucccccucccuucaggaauucaagcuaccaguuucucucccuuagagagccagugaccuguccccauccuuuggcuccuuccagccuucugauagguccaggcccuacuagccuugugggccgguuuggggaccuuggguggguggguggguggucagggaugugugucauugucauggaaaccccauaccaucgggguguguggguagcacaucucugugaggcaaagucagguggugguggaguguauacagagaaugugugugaugucugucacaucuguguguauauguauauguguguaugucauguucaugucuggggaagauguguguguuugugugcauguguguacaccugcguuuccaggccagaauggucacaugcucacagagcauguuuaucauguguccugugguuggcagaucugcccacuuauuccccaucuuucuccuuauccugaguccucagggucuaggggucucuggcgggggucucccguguguuuuggguggggacaccguguguguuuggaguugagguggcauguggagguugcuguauugggguucaguaggggcugggagggguuccaggggcauauguauuuggggggagggcuuagugaaaguugaugggggugaacguuuagggucuucaggcagacauggaauguguaaagggcauggaggaugugcaguggacauaggggucguugggaccuuggggacuuggcaaugccaagguguuugcugaggcuguggacucuccagcccgggagaggucgccggaccuuugaggggcauuggaauccugggcuccuccucugcuggguggagccgcgaacccucguucucuccgcgguuuuguguguguggggggguccugcucaggaggggaugguggguggccugguuuguuuuggggguccccuugccccccucccccgucucucucgcgcugucuccgggcgacagggcucgugacagaggcggccacggcagcagcggucgccuagcaacggcggcggggcccgggcaacggcggcagcggcgggagcggcggcggagggagccguucccgcggccgucaccgcgcggccgucccggccgucccgggccccgccgccgcccccaccgcgccgggcggcgcgagccgggccguaccgcccccucucccuccgcaccccgcccuucccccgcgcaggggcggggccccucccccaccggggacaccccuggcccccccggggggcggugcgagguaagggcggggccgggcggacuaggagcgcgcguagaggggggggcgccgcgcgcguggggcgggggcgcgcgugugcgugggcgcggggagggggguggggaagccgcgguggcggcggcggcggcggcagcugcucccuccgcauguucucgcugcaucuuccgaguggggggaguuaugguaaccggagggggacagcggaggacgggagggucggggaccggccucgugcggacagggucuugagcacgcgggggcggccggugugugugggaucuuggagccccugguggaaggggcagcccguguguccgcguguguguucgugcccaugcucgugucuccugugugucggugccaugugcacacgggggcccaguuccucgugcacacaugugcagccauccuugugcaaguguguccugucuuaucuugccucugccuguuuccugccuagggggcuguugggccagccacgggcuuguggggcaguccgcggccuugcugguccaugucaccucugacccugagcaugcauaucccuggcuggggcucaccuccugucaggcuucugugugugggaauguguggcccuaugagcaggauuuucugugucccugguggcaggugugugucuuugcauguguguuccagcacuggccugaguaucugugucaaucccagcauggguguccagggcgugucuggaugugggugguguggcuggggggaguaagugugugaauguguuccuuggaauucuacuguguaugaaacaccuuugggcugggcagguguaagcccugcuuggucaguaaguggggacagaaaagcuuaaaaagggaagaaaugggguaaagaggaaaaguggggaggggauaggagagaaggaaugagagaggcuugaagaagagagcagagagcagcaggccagggagaaagaauagcuggagaaugggaaugugggagaaagccaagccagacuuagaagagagaacaggggauaagagcuuaagauggggaacuggauagagauggugggagaagaaggggucugggagcuggggaggcaguggggaggagagagucaggccuucugguaaagugaucucugaaagaagaaagggaagaagaugggagaaggcacuggauucuuguaggccuugcaggaucaggcuugguuuuggaucagggaaggccacucaggcauacgggcuggcucacagugaggccugucauagcagggacugucauuagagguucauauccccagcacagagcucugucucccauuucucugcucuguguccaacccuguucuucgcccuucucuggcaaccucccuccucuggcuccccuugagagcugccagcuggguguggagaggaagaaaggccaaagggaagguuagggauuuggagggcagggggagauucugugggugauggcaagauuagagauguuggaggggcaggaguccaagcccuugcugugugugugugagugccauuguguguguacacaggguguguacaugugugggugugugcacaaugccuguguuacggguuuguguagguggcuguuaugugugugcaugcguguauacaucgugcaggcaugggacauggagacccaggaucacaguuugugcuuuucagguuugcuguguguguguguacacggguguguguuguuuucucuguacaugucacugcaugcagcauuaauaacaggauguucuguguuucugucacucugcccccccuuuccucuguguuucugcuauucuuuuccugcggcaacaaaaguguuuaauaagcauauguguauguggccucuguguaccugugacuuaugagugaguucauggaucuuaguucuugguaauauguguaagguuauauuacuuccaagaaccaagcaagccaauuagcaaauuuguucuucuguuaaugcuuuaguuccaaagcggaauuuuaaugcauuuaaaguuagacuuuaugccuuuauuagaugagcuugcacaugaaaauaauggcugagcucgguucccugaaaugagagugaggcagccauaccugagaaaugcagaaaaaauguuacuagggaagagauauccugaaccauuggaugcauugcuuaguguguaccagaaggauaauuaacacauuugcuccugguuuuucuuuacucugguggcaaucucggaugccuguguuagagugagagaagggcugggggaggaaaggggguuguccugagacagaguggaugugguuguacuuuucacgugaaugaaaggauguuugugcuucugagauauggggauaccuuucuguggucaggaucaugguguacucaagcauguauuucagggguuaaacuggaauuccccugcauggggauaugugugucuuaggguuauagguccauuucuguagugugcuguccacaugauugcccaagagacuugggccacaaaguccacaccagcagcucucaugugggucacuggguucaaguauguacucccuuguugcagagcucacauaugucaaagcauguauccuguggggugugugggccucagggucucagaauguggauccgugcuaugcccgugcucacaguugucuguaugucucaaaagcacauagauccccaguuauuuuucuguauugugguucucauauacacguaccuccauagcucaguauauguuucuguacuauacaccuguuccugagggagugauaggguucucgugucaugggguccacauuuuuguaugcaaaccuccuaacaccuggguuuuacagguaaagggaagcugaggacugauucuagggcaguuugcaggcaauuugcaauucuggaagcagacagugaaaauauaauugugguccucccuuguucuguucuggaaccuagaggguuaacaggcagcucuuccgguccaccccccuccuuccagccuguagcuucuuguugccguggagaugguggccccgccccgaugcagcaccugcccccccauuggcugcaguggugacuguggggcugaggggggagcccaggccugggcagccauucuggagcuggagccggagcuuggcauccccccacuuacauucucuuccagccccucggccccucuaaauucccuugcagccgagccucagcuuccuuuuucagcgcuugccaucccucuaggcucuuggcagacugagcugcauccgcauucaccuccccuccuccuccuuucccuauccuuacuugggagucccgagaacccccacuguccauccuuccugcucccugcccauuccccugcauucuuugcuuuuccccuccccccaccaaccuucugagccccugccacugcagugcacguggaaccggcuccuucucccuuccccccaccugccccuuccuuggauuuucuguccccagcuucucccccugcuacucuucacaggucucuuccaagaccucccccuccaguccagggagggggucaugggaggcagcccuggcccuccagacagacagggguuccaggagguggggggcagguggaagaugugcccaccagggggaagaggaaagccugccuaugggcaaugaccuuuaacccaucuuuccccccagcuagccccuucuggggugggugggcaccagggaccuagccucccuggaucuuugguguccuucauuacugggguuuuacugacccucucagccaugcuccccugcugacugccagccccagucaugggccuaaggccucccaccccaucccccucagggggcuccugcucagguuccuugcccccuccuucccgcugccagccucuccgccgucgcugcucuuccugcugcuuuccgggggguaggugaggccggagcugaggggcagagggaggugggggcaugcacuggggucaggggugggaaccuggguuaacagcuucccuucuggcccccuccccaacuucccuucuggccauuuccuccccuccagaauaccacuugggucgcucgaggaggaagagugucccaggggggaagcaguacagcauggagggugccccugcugcgcccuuccggcccucggugaguggugccuaccagauguggcucaguugggcccccuccccuccagccccaacuggggcccuaggagucugagaaagagggcaggagggggagagagggagugagagugagaaaaagagugugugucugugugugucuccccaccucuuugguuucccccuucuuggcucugccccccugcuucugagaccagcccucccaccuucuccaagcuguguguguguguauaugugugugugugugugcuugcacuguacccgugggagcaaggaagacaaacugguauuaggguuccuaucccccuuuccucgccucuggagacuucccuuuuccccaucccacuuucauccaggggcucucuaccagcugagggaugaguagguagaacugacccugccccaacccaccccauccccauuucccccccagcaaggcuuccugagccgacggcuaaaaagcuccaucaaacgaacgaagucacaacccaaacuugaccggaccagcagcuuucgccagauccugccucgcuuccgaagugcugaccaugaccgguacaggggcuggagcaugugggaugagauugauguaauguagggucuccugugugagaugcagagggaggggguuaucugugugcaaagguugaaggauucaacucaaguugguugggggaugucauggcacaggggacagaacagaaaagaacuagaauagggaucugugagcagcaggagagggguaggguggcagagagaagacagacagacaggcuggaaagggaaugaaggugaagccaaggagggacuccucagggacuccucaggccaagaaggaugggcucuagcccaggaucaaaggagcuguacaggaggagagugacccuggaggaauguuuaaggaaugcagggaagggguugguaggugagugagcaauaggcuguagguggaagggugucagggaaggucaggaaauacaggggcagcagguuggaguggggcuggggguggcugaaugaauggaugauggcuagggcucaaggaccucaucagugagggaagagacaguauagagcauggcagagaaggggaggcugggacaggugugcagggugacagaaugggaagcaacccauggacugaggcaugaagaagcagccagcggagaaguccagaaggcacugucccugagaccaggcugaaggagaccuccacuguuugccuuuguugccugccauuugggguuccucucuggguuucccccucacccagucacuccccagggagaaccaugcccucccuuucccccaugucuggccacccccaggauugggcagguagggagguugggauaaagugagucacaccuuucccugccccccucccauguugccagagcuggauuuggggccggcagggggugagggcaugguauuccuggccgcgggggcggggggggggguccgggggccgggggagcgucgcgcugacggcagccagagccugcgaugacggggcugcuauaaauaacuucuuggaggcucccacacccaagcuccccucccgcuuucccacugcucucuacucuucauccccugcccaucuccauaccgcuuuuguauugcuauccuaccccucauuauuccaugccccuagcccccuuuaucuucugcccuccugcagugauuuuuuugcauuccauccccucuuagcccucaccucgguucucccggccaucucuccaguuggccuuccuccucuucuccuguccucugucuugcugcacauaccuuugucucccccuuucuucuucuugcccuaccuccucuucuucccuaguccguguauucugucuuuuauccucuuugagcucuuuucugcccacagcuuucuccuauuucuuaugcuuuucccucacucuuuccccugcuucugcuaaaacuuguccucuuaugcuguguucauucauucuuugaaucauuaaauguuuaucaggcacuagccgugugccaggcccaggcuagacauaucucuucucugugccuucacuucuuuacuuccacuuuuuccuuuauacugaggcucugguuucugggguuaccuggagguacuaccuagaagugccccaggcccacuuuguucucuccuuuuuuuuuuuucuuuucugccaugguccauuucuggguugagauauuucuagauguccccaguccucgcaaucccuuaggugugagauggugggaguuucuuuuuuuuccuuuuuuuuuuuuuaaauagaaauagggucucacuguguugcccagacuggucuugaacuccugggcucaagugacccucccaccucggccuuugaaauguugggauuacaggugugagccaccaggcccagguggagcaggggaguuccuuaaaggauucugauuuuucucacaucccucacguccuuccugauaggcaggguuucuuucugugucuguuugggaaggguguucagggggccuucucuccaagucuccauccuggaacagacugaugaugcaggguaccuaugugucuaagaagaguaggggggccgggcgcgguggcucaugccuguaaucccagcacuuugggaggcugaaucacuugaggucaggaguuugagaccagccugaccaacagggugaaaccccgucucagcuaaaaauacaaaaaaaaaaaagaaaaaaaaauuagcugggugugcugaggcaggagagacgcuugagcccaggaggcagaaguugcagcaagccgagaucacaccacuguacuccagccugggcgacagagcaagacugucucaaaaaaaaaaaaaaaaaaaaaaaaggaagagugggaagcccugaucccuuccucuccugaaccuccugccugccagggcccggcugaugcaaagcuuuaaggagucacacucucaugaguccuugcugaguccuagcagugcagcugaggcauuggagcucaacuuggaugaagauuccauuaucaagccagugcacagcuccauccugggccaggaguucuguuuugagguacugggucuggugggcuggggagggccaaaggacaggggugauggaagguggggggcagagaggucuagagaaaguggcacagguggggacaucaaggaaacagaaacuucugggacuggaggaaaggguaggccagggaggaagagaagguagcagagucuccuccccucuguagcccuuucccucaacuccacacuccuuucuagguaacaacuucaucaggaacaaaaugcuuugccugucggucugcggccgaaagagacaaauggauugagaaucugcagcgggcaguaaagcccaacaagguauuggggaauaaaggggacacaaccugugcagggcaaagguugcaccaacacgggaagcugggggccuagggaggaaagugaguuaaaggaggagaggcuuggggaaggagaggauugagguacaguguaucuggacaagcagggggagacccccauuauucugagucccccauuucuuuucgcuuucuguacugcuacccugccuuacgaucucuuucccugccauagaagucauagacuuacagaguugauggggcucuggaaauucuuuagucuagcuucccugcaggcaggaaugcuucacuaauaccccgcaggacacaucaaauacacuuagccaaguuucuguaccuugguuuccucucuaagacagagggaacugguggcaauggguuggauuaaaugaucucuaaggucccuuuggcacauaaauucuaugagucuguucuucccaaaacuucaugcuuccaguucugucagcuauucucuguaucccaguuucuagcaagcuuacaguccuagucacacuccucuggggggaacucuugugucuugauguccuuaaagaacucaacccaagaugcugacaugaucugaccuaugcagaguacaaacaccauguucccuuucaacacacugcaauaucaccugagccuuaccauuagcuugugcucaauuguauccccccaggcccuuacugauucuuuuuuuuuuuuuuuugagacagagucucacucugucacccaggcuggagugcaguggcgugaucuuggcucacugcaaccuccgccuccuggguuuaagcaauuccugugccucagccuccccaguagcugggauuacaggcaugcaccaccacacccgacuaauuuuuguauuuuuaguagagacgagguuucaccauguuggccaggcuagucucaaacuccugaccucagguugucugccugccucagccucccaaagugcuaggauuacaggcaugagccaccacaucuggccaagcuuuacccauucuauaugcaauucuuuuuucacaauuucugauagucucugcaggacuuuccaguucccuucaaauucuacauuaauauuuuuggcuuguuauuccagcuuuugaaaucuuuccaauacuguuuguguugucuaguguaugucuacgcuucuacaguagcuuccuggggcugcuauaacaaacugcuacaaacugggucacguaaaacaacagaaauuuauucucucacaguucaggaggcuggaaguccaaaagcaagguaucagcagggccacgcucucuuugaugcuguagcagggaauccuuccuugccucuuccuagcuuccggagguugccagcaguccuuggcauuccugggcuuauaacugcauccgucuaauuucugccuccaucuucauguagcuggcuuccuucugugugucucuguauccuguaucucugugucuccaaaucucccucuccauauaaagacaccaguuuuuauaagguggguuaaggguccacucuaauucaguauggccucuuuuuuuugagauggaauaucgcucuuguuucccaggcuuggagugcaauggcaugagcucagcucacugcaaccuccgccuuccagguucaagugauucuccugccucagccuccugaguagcugggauuacaggcacgugccacuaugcccagcuaauuuguuuuuguauuuuuauuagagacgggguuucacuauguuggccaggcuggcucgaacuccugaccucaggcaauccacccaccucggccucccaaagugcugggauuacaggaaugagauaccauggcuggccucuucuuaguuugauuacauuugcagggauccuguuuccaaauaagaucacauucacagguucaggguagacaugaguuuuggugggauacuauucaacccaguacaccgucucaccuuaugauugcugucuguaucccacuuucuuacugucucuccucuuuuggugucucucugucccuucccccuuuaacaucaugcccaccccaccaugccaggacaacagccgccggguagacaaugugcuaaagcuguggaucauagaggcccgggagcugccccccaagaagcgguacuacugugagcucugccuggaugacaugcuguaugcacgcaccaccuccaagccccgcucugccucuggggacaccgucuucuggggcgagcacuucgaguuuaacaaccugccggcuguccgugcccugcggcugcaucuguaccgugacucagacaaaaagcgcaagaaggacaaggcaggcuaugucggccuggugacugugccaguggccacccuggcugggcgccacuucacagagcagugguacccuguaacccugccaacaggcagugggggaucugggggcauggguucgggagggggagggggcucgggggguggcucagggggcaagggcaaaggagguugcccggcugugcggcugaaagcacguuaccagacaaugagcaucuugcccauggagcuauauaaagaguuugcagaguaugucaccaaccauuaucggaugcugugugcagucuuggagcccgcccugaaugucaaaggcaaggaggagguugccagugcacuaguucacauccugcagaguacaggcaaggccaaggugaguguugugcccucagggaaaggugacuugggaaugggcacuugcuuggggguuagugaggacagggcaaauucacgagauuggguugugcagaggcugacacuuggauuuuccugggccucaggacuuccuuucagacauggccaugucugagguagaccgguucauggaacgggagcaccucauauuccgcgagaacacgcuugccacuaaagccauagaagaguauaugagacugauuggucagaaauaccucaaggaugccauugguauggcccacacucaggcccucuucuucccaaaccugccagauguccaccccagaccccaaguccacccuuccacagcuugauacuuccuaacccagaguccuaggacuccagccuccaacaccugauucugaaauuuccccaacccuggccacccccuucccugcccuuggaaagugugaccacacccucuugugcccccaccccccaggagaauucauccgugcucuguaugaaucugaggaaaacugcgagguagacccuaucaagugcacagcauccaguuuggcagagcaccaggccaaccugcgaaugugcugugaguuggcccugugcaagguggucaacucccacuggugagacugggaacgcugggcuggggggccagggucgggggaauuauguguucaucuguucaucuaucuguccauccucaaagaggacugagcaccauuuaugggcaaagcauuguucuaggcgcuauagagcaaacaggugaaagaggccuggucccugcccucagagggccuccaccagaauggggacaaauuagaagaaaaaaaaaaaaagccacagagccauaaugguguguaagugcugaguaaggguccccccaaccucugugugacauaaggucagagagaaggcagagcuuugagauaaguggggaagaggugcccccuuggguaggcuuugaagacugguuuagguucugauauauggacauaguuggcaagaaagacauuucagaagaaggcugugagaaaggcacaugugugauggugaaaaggcccaggaguuuucaggggacauuaaaguagguuaguagcaauuacaucagguuuaguggagcaugugccucauaauggggaguggcgggagagaugucugggcaggaagauuagcuuuagaaacuggaaggccucaaggagucugaggucauugguaggccuugggaugccauuaaaggugucagaaauauugugauuuagaagauuaauccauaggcugggcacgguggcucacaccuguaauaccagcacuuugggaggcugaggcgggcagaccaccugaggucaggaguuugagaccaggcugaccaacauggagaaacccugucucuacuaaaaauacaaaauuagccagaugugguggcacaugccuguaaucccagcuauucgggaggcuaaggcaggagaaucacuugaaucugggagguggagguuguagugagccgagaucacacgauugcacucuagccugggcaacaagagugaaacuccaucucaaaaaaaaaaaauuaauccauaaguagaguguauguaguagaguagagggauguauguugggggaugacuggaauagagccagcugggggcucggaggcaugaaagucagauccugaaucagaacagugacagaaguuaggaaggagcuacuggaaggacccucucgggaaaggaucaguaggaauugucagcuuauuggaaaggagggagcaugucuguggggagucacggaugacucaagaggccaugaggcuggugguugggagaccgguggccucauugacaaccaggaaagucaggaggaggagccaguuggaggugugggggcgauggugagcucugcuuuacaccagccgaguuuaaggugucagugggacauugaaguggaacugggaggugcggggagugagcucugagccauuccagggacuggggaucaugccuggggcaccuccauccccauuucccuggaauccagaagaguugggggguccgagcucccuguaccucaagugacccuccaucucucucccaucucugucucucccuggugucuguuuuucuucuccuccucuccuugucucucucccacaccccuccaucucucucccacgugucucuccccucaccuucucucccccuccauuucucucucccuaaucugucuguucccucugccauggcccccuucuucaagcagccucccaucuugcuccugcggucccuccuucccugucucucucaccccuguuuccacacccucaccuccuaccaccccccucagcauguucccuggaagcugagggucucuggggcucagucccggucucucucuuucucucucucucucucugucuccccgacccuuccccccagcguguucccgagggagcugaaggagguguuugcuucguggcggcugcgcugcgcagagcgaggccgggaggacaucgcagacaggcuuaucagcgccucacucuuccugcgcuuccucugcccagcgauuaugucgcccagucucuuugggcuuaugcaggaguacccagaugagcagaccucacgaacccucacccucauugccaaggucauccagaaccuggccaacuuuuccaagugagggaagcuucaggagugggcagggcagggaguggcagggcagggaguggcagggcugggggucggcaagaagggucuccugaguccccagagauccugagauggggaggcuaugauaccuuguguguguguguauguguguguauguguguguguguguguguguguguguaugugaccuuuaucuucugcauucuuggcuagguuuaccucaaaggaggacuuucugggcuucaugaaugaguuucuggagcuggaaugggguuccaugcagcaguuuuuguaugagaucuccaaucuggacacgcuaaccaacagcaguagcuuugaggguuacaucgacuugggccgagagcucuccacacugcaugcccuacucugggaggugcugccccagcucagcaaggucagcagauccccucuuugcccuauccccagauggcuccagagguuccuggagccugagaaacuacccuuugaagauuuuuuuucuccccuuguuucucgaggugucaccacuacuaucccaacucaggcccccuccaccugcacccucagaggcccucuuagagcugggcacugagcccccagguaacagccucacccuuccaggaagcccuccugaagcuggguccacugccccggcuccucaacgacaucagcacagcucugaggaaccccaacauccaaaggcagccaagccgccagagugagcggccccggccucagccugugguacugcgggggccaucggcugagaugcagggcuacaugaugcgggaccucaacaggugagcacccugggacagccaggccugugcccuaggagcccuucuccuauucuagauacuccucacugggccccacaugcaucucucuagggcuugaaagaagggaggaaaaagcaccaaguucucaggggagacgauaaggagacagguacagucagugguaggcugagagcccuuuacagccugagggagugagagauuuggagcucuaggaauagggcugaggcuccaccaacucacggcuuaguuguaagccuagagcaucccugcugcaagcucugauuugcugucccucugccugcccaugcuaguccccaggcugagguucagccagcaugucaugucagccaugugucaaaauguucaaacaucucaguaauagcuagugaauaagcacuucccccagcccccgaccacaaccccacagaccuccccaugauccagcacuuagagcagugacagcagaagccuagcagggccugcagccugcuccagagucccagccuccauucugauagguggugcccgugcuucauuugcugcucauuauuuugaugauggcccugcuuuuuccucugcccgugucuuccuccaugacaccauacccaucccaccauucccgccucuccuuucauuuguccacaucucucuccuucucugucugugcucgccccucuuuccaucucucuccagcuccaucgaccuucaguccuucauggcucgaggccucaacaggugaggggcucuccccucccccgcccuccucuccucuccugucuguucccucucccacuccacuggccuucgcccuacuccucuccucuccuccuccauggaccucaucuccuccauaugugcccagcccugcccccaucccuucucuugcugcccccaucuccccuccucuaggccucacccccuucccggaggggcccuguccuuucccuuuacucaccuguccccucccauccucccugccugcccucuucagggcugccaccgcuagcucucagcccuucccucugggucccacuuuucaccccaaggccugugccagaccacagcaagguucaauugcuaggagcccugaccuuaccuucugcuugugugcccccuucccuucugacagcucuauggacauggcucgccuccccuccccaaccaaggaaaagccacccccaccaccgccugguggugguaaagaccuguucuauguaagccguccaccccuggcccguuccucaccagcauacugcacgagcagcucggacaucacagagccagagcagaagaugcugagugucaacaagaguguguccaugcuggacuuacagggugaugggccugguggccgccucaacagcagcaguguuucgaaccuggcggccguaggggaccugcugcacucaagccaggccucgcugacagcagccuuggggcuacggccugcgccugccggacgccucucccaggggaguggcucauccaucacggcggcuggcaugcgccucagccagaugggugucaccacagacggugucccugcccagcaacugcgaaucccccucuccuuccagaacccucucuuccacauggcugcugaugggccaggucccccaggcggccauggagggggcgguggccauggcccaccuuccucccaucaccaccaccaccaccaucaccaccaccgagguggagagcccccuggggacaccuuugccccauuccauggcuauagcaagagugaggaccucucuuccgggguccccaagcccccugcugccuccauccuucauagccacagcuacagugaugaguuuggacccucuggcacugacuucacccgucggcagcuuucacuccaggacaaccugcagcacaugcuguccccuccccagaucaccauugguccccagaggccagcccccucagggccuggaggugggagcggugggggcagcgguggggguggcgggggccagccgccuccauugcagaggggcaagucucagcaguugacagucagcgcagcccagaaaccccggccauccagcgggaaucuauugcaguccccagagccaaguuauggccccgcccguccacggcaacagagccucagcaaggagggcagcauugggggcagcgggggcagcgguggcggaggggguggggggcugaagcccuccaucaccaagcagguaggugaaggcaggaggaaggcgggcugggucacaacagggagggaagaaggagauggggggugggguugaaacagagucuguggccugaaguuacaaucuucuugccuccuuuuggccauuaaacaaauguguauagagggccugcuaugugccaugugcuaugccaggcacuaaggauacggcacugaacccucuuagcacucucauuccagaggggauuaauccauaaguagaaugggggugacuggaauagggccagcugggggcuuggaggcaugaagaucagauccugaaucagaacaacaggagaaauucucuggcauucaacucacaucucuggcauucagaggugauaaaggcuacagcagggcaauaggacugggacugucgucuccuuuggcugugcuguugcccucuaaauguacccugcuuuuucccaccuuuucuuucucuguucgcccucacugugccuugucccagcauucucagacaccauccacauugaaccccacaaugccagccucugagcggacaguggccugggucuccaacaugccucaccugucggcugacaucgagagugcccacaucgagcgggaagaguacaagcucaaggaguacucaaaaucgauggaugagagccggcuggauaggguacgaugggcucuaccagcuccaagccccaguguuuccuuuuacccacaggggagaucucuagucacuuccaagggaaaccuccagggucaguuauggugguaagaaaaggcaaagaccugaucaccucuugagaagccuuccguccaucuggggagaccagauacacacaguuguuaaaagucacuuucaacucuauuuuguagguuauauauaucauagacuaucuggggaucaucuauuuuaggcuuaccuccauguucuuccccaggaggaacauaagcccuggcuccugugacugcuuaggaaaggaaauguuacuuuacuggcaguaggagcuaauaaauuggauggggauggaggggguugcagcuauauuacaagugaugucuggccuacccagucacugucccaugggcauaagugacagucagugggcagggaaugcaugugguaaaguaguauguaucagucaugugugaaaagaccauccagacccucacuugguggaggcugagggcaaagggcaccaagagcucuggggcuaacacagauaacuuagcagaaaguuacuugaggaagcuguuguuccuagggccugaggaagagggcggcugcaggauuaggucauauauaaagaacauaugauccuaacacggggaaguggucuuugagcauaggaaauguugggacugacucagaugggcuugaccagcaaauuuaaugagaauuaaacccuaauauuagccccaaggcagccaccguaggaaguuaauucacaucucuccucugcauguagaaggguuggugauauauguauguauccucuucagagaaugaggaaauagucuuuugaaucauuuuuuuuucugugcuucagaugaggaaaccuuguugagaaaggcuguagacuagcacuauccaauauaacuuucugcagugaugaaauguucuguaaucuguaguguucacaugugucuaguugugauucaggaacugaauuuuuagaucuauuuaauuuuaauuuuguaauuuuuuugagacagggucuugcucugucacccaggcuggagugcaguggugcaaacauggcucgaggcaaccuccgccuccugggcucaagacauccucccaccucagcccccugaguagcuaggacuacagggucgugcuaccaugccuggcuaguuuuuuuucuuuucuuuuuuuuuuuuuuuuuuuuuuguagagacgggguuuugccauguugcccaggcuggucuagaacuugugagcucaagugaucuaccugccucagccuuccaaagugcugggauuacagguguugagccacugugccuggccuaaauuuuaaauagcuacaugugggcugguggcuaccauauuagacagcacagcuguagacucuagagccaauagggcagauaaaaugacucuucugagcucuuccagcucuggaauuccuagauucucagccuagaauucacuuguagaccuccuauccuuggcaccuugacagagccaaggagagggucacauggaggacagcaccugccuuucccccgucaauugccuuuucuuccuaugucuccagcauguguucuggggccuggcuuagggcugaagagucacccuauuuuuaauuucugagcacaguuacucaagguguguuugugaguguagguuucugugugggucuucaugaggggccauacauagaccucagggugugggagucugugaccuugcuccauuuugagggaaccucagcaccauggcagggucuucucaaaagcagguguguggauaugauccacaggcagggaagggguuggggaaggcagcuggaugucccucaacaugcaguggcugugcuuggcagacagggauggaggcuggguggugggcuugggguggggcgccccucauagugcggggucgugugcccggcgggcaggugaaggaguacgaggaggagauucacucacugaaagagcggcugcacauguccaaccggaagcuggaagaguaugagcggaggcugcugucccaggaagaacaaaccagcaaaauccugaugcaguaucaggcccgacuggagcagagugagaagaggcuaaggcagcagcaggcagagaaggauucccagaucaagagcaucauuggcaggugaggggcggccuggggaggggguugugagggagagccugaggcuggagagagcaagugggugagcuacuccgcugacucccauccccaaacucaggagcccaccaggagagcccaccacucuccuccccaggaagccacccacucacucaucaccagauggagagaaaccccaaccugcuuagugcauuaaauaucucuuuaccaaacccugaccucucuucugauagaguagcuucggaagcccuuggaaaauguaccuguuccuguccaaccaucacugcauuugcauuuacccuaggccagagcuccccacuaguuauucucaacuuaaccugugauguucacuccaaaccuaagcagggcucccuagccagaguaggcccugcccuuccuggguggacccucccucucuagccuuggaaagguguucuguuagaaagggucuuuuagccuguguauguuuucagcugcuccagcaaguccugggcuccaaagaggguauccucagcaaagaggucaauuaucuucagagugguggggucggggugggggggacccugggcgcacuccaaccagagccaccuccauuuugauccauucuaaauguauuuuauguaagauuuaauuagaagaaaagggcuucuugaaauauuuuuugaaaaccacugcucuaauugauauccuuuaugauaaaucaccucgaggaucuucacagugaggugacaugggggaugcagaagccagguccucagccauggaaggucuggggaaggggcacugcuguccugauugggacgauggaggccuggaggugucuggaugguagaagucuuugaggcacagaaagcugccuuagcagggagguguaaggguuccugggaggaagguggagagcaugauccugaggaacagggagucuugcaucacggcaauggagggacucugauucuaagggauaaggaugccugagguuuuuccagagagcuaugggguuccaugggcaggcucugagccugugcccgccacuaaccccacugaagcccgucccuucaggcugaugcugguggaggaggagcugcgccgggaccaccccgccauggcugagccgcugccagaacccaagaagaggcugcucgacgcucagguggaaauuacaaugucauuuaucuucuccgugucccauccccauccaucccacugucuuucgugcacucacuacaccagccaccuagccccaucaccaucugucucucauagucugcuguuuguccacuggcugcuccuggcagcccccuagugaccccaucuucaucccaucgucugugccuuugucacuccuggcagcgucagcccaacuccugugccuucccauccagucuucccacuccucucugcaucucaggaccuucucuaccagaaccuuggucuuucugccccuagaccccaccuaguuccaagaaccccugccccuucuuugcucacuccuauucaagccacguuguucagcuuccucugcgcucuugggccagagggcuagaagcugccguuuucuggaauagagcacagggcaguaugaucuguaguuucuccaggcccuggccgguacccugaaaacuuggggacccaucaccucuguucucuuggcucccuaauuuuccugucuccuuggcagcuccugcauagcuuccucuuccugacucuucagaucuugaaggccuuccauccuguaaccucccuuugcccucaguauuuaaguccagccucccucuggccucccucccacucuggcccucagaccuucccagcugccugcugcccagccucucuucucacaagccagcuucuaggaccucccuucugcacccuuaccccuugcuuucccaaaauucugcucauuuuccuacccauacuccucuuugcucugacugcuaggcuccccccgccugccauccccccaccaaggcuccugaccccaugaccccacucucucccacugcagcuccucaucagguaauucuccugguuccgcuuuggccacgggcggaggacacagggggaggugacuccggaccacugcagguuggucgugaagcccacucccuccaacaccuccggagccucuccccucucacugcugcccuccacacccagagaaccuccacagacuccagcccuccgacaccugcacagauccaucucccaagacaccacccaaagagagcauuugcugcugcuucccagaacuguccaacaauaccuuagcaacaccaagaguugggcccuagaugggcccagcacauucacaggucacacccacuucccugcaaaacccacccccucccagccuccuccugacucuaagcccuccucuuccucuaccucuccaguguaugucugucaccccccauuucaccagagcguccuuaggggcuggggguggguuuguuaaugggguggaggcaaugauggguuggaggaucuuggcuauaggggcugugcugacugcagcagguagguuggguuucccucuuccuucccuaaucuugguucucuacccuccuuuccacuccucaccugauucucucucuuccuccuccuuauaucugugaggcagaaggcaucugaagcucauauuagcccccauugggugggaauuaggaguggguaguuaacucagggagacuugagauacccuggaaaaaaugcuauugagauguccugacauuaggcaggguggauggaacaagaaggagcaagaaaggaaccucaggcagauguuaggacauggacuugaucauguggccugggaguuuagaaauggggagagacauccuccuagaucagaucgugggcucaguaggcauguugauucccagggagaggugccaggaacagcaugguaaagaauguacucuucacagcucacauccccagguugcugaugccacucacucccccucuccugccaucgaguggccuugccggacacaucacccuaccuaaaaagccaguaaaugagaaccugucagcuauagccaucauuucugagaugcgauuuucuuugggauugagcugcagugggcaguggcuccuuacacuguaauuuuaauucucugccugcccagccucucugucaaaguagcuggugaucuauaaagaugcuaaaaggcaccaggggacuuugccauuuaaaggacuccugcagugaauucuuuuguaaaaugaauaauggcacccuaauuuauccacuuucuaaauuuggguccauggggguguccagggcaugcuuaugugcugucaccagcagacaaacagagggaauggaaucuggggguuccuucccugcucucccgccauacucaggauacccuaccauaagugauuuccucucacugacuugcagaaaaugugugagauacccagcaagcuaagaaggcaguuuugcuggguaucucauacccaaggcugggguuugggugaucugagagguuagcuccuugauccuaggauggaagggagagcuuauauagaagcuuuuacuuggaagguuuuguauccuaaggucagacauagcuauauuaccaagccuaaaugccauguggcccaggaaauaauuuggacauuuguucuaaaccacuugugguagguauuggucucucugcaacucagccauuaauuagaaauuaguuuugagccugaauuuuaaaaagccaaguguugcccccagcccacacacacacacacggacauguacaguacaaaccccagauaauuacaacagccaaagagagaaggaagugaauuucccaaccagaagcguagggaaauucagauggcuuucuuuucucccagcagaggaacagaaggcggagcuaagggcaggaaccaggaguuggucaaggagcuauaggaggugaugagaguagaaccagggguaggagcuggucugguaccccucacccucuaauugggagcccagggagaaggacugaaaagaagaugggaguggaaaagaauaaagccaguuucugcuucccagggaugcagagauuggggcaugcugugucugcagaagcuccuagucauuuccgccauaauugugagagagaggggcagcccucccacaagauuuuucccuucccauaucacuucccugaauccccuuccuuuccccccaguacaguuaaaccucucucuaauuuggaauguuauauuugagaagauggccacugugaauaagugacaaacggaaugacagugucuauuuaaugaaaugcaugucuucaaaauauauacagaacucgaugaacaaggcuuuuuccacuccucagggagcaugcauuaaugaauagauaggauucaaaagucuguuuucugguauggguuaaauauccccuccuacagacauauuuccaccacuaauuugcuuaguacaccuuuucuucacagauaaaggaaaaugcaagcucaguuuuucuucagauuaugaagaaauuccaaauccacagggguuuggauuaaugagguuuugcuguacugccuccccuuauuccucaacaugaaguucccaccucggauuggggaugggugggaggggguuucaagaggaggagggugggaugggcaaggaauauacacaggugaagccagagaaggguuagguugggggugcggugggaacuugcuguuuugaucugguuuccuggugugacacucuggguuaaaggcuugaaggccccuguuaggagucuaggggugagauucucuucucucugaucccagaggacguuaacuucuacugcaggugagaaacaaaauaggaggaugguggggacuguccugggaggagggggugguccauggcuuguggugugggcuggcuauaggggaggccacugcuaggggacuggcauccaggcccccuugaagcgucucaauaaguccgcgcucuccuuuuuggugucuugcaggagaggcagcuuccccccuuggguccaacaaacccgcgugugacgcuggccccaccguggaauggccuggcccccccagccccaccacccccaccccggcugcagauuacggagaacggcgaguuccgaaacaccgcagaccacuagcccacccagcaucagagaccuucucuuccuuuccugugcaccccacccuguaacagcaccaaccaccaggauuggacaucaccgaggaacagcgggauugccuccccgaaugccucccugggaggcacacugauugcccacccccaccacugcaccauuuccaggagggagaguggggacccucagccgcccccuuuuccuucccauuggggugcugcccucucuuugacccccagggacccuugccccaggacaccgccuaccccguacagaccccuucacuccggggugcuauccccauccucugccucaucguuccccugagcacugggggacagacccucacccccacccuggggguguggcaccuccaaacuuucaacuucagggugauuuuuuuagcaguaaccagagcugacaaucuaacuccccuccaccgccccauuuuggccuccccugccccccuuguuauggggaggggaccccgggugagggggcccuauuaccccuugauuucucaggagcgucugggggggcucagcacgcacaaacuccuucuccuucuaccacucuuaaauuuacucccuccccacccagaacccagaugggguggagggggccaccggggcagggagggggcggcaaggggggaaugggaguugucuccccuucuccccacaccugaucugcucucggcuggucccagagcggggugagggggcuuaugccccccccucccccaguguguugggugggguggaauugagguuagggugaggggucaggguuuaggaggguguguauguugggaggacaggcuaguugaucuguccuacucugacacacaguccccucugccccuuccuucucucuucuuggucucuacucccagggggaggggggaacuuacucuaggaaaagccaugucucucucccccaggguggggggaccuguguuggaggagggguguuggggggcccccuuccaugacucuguccccugggggagguaggacagggcugggcuucccucucauccucccccucccaaucuccuuccaccucccucccucccgccagcuccacgauuuuucgguguuucucuguacauaguuuucuggcgggauaggggagguaggauggaugggguuugggguggguaggccaugggaggggagaagccccuccuuggcacccccucuucccugacugcuguccccuacccagccuugcccccuucauccuuuugcguuugguauugagacucuccuagacucuacuccucuuucuuuuguauggacaguuccccuucagucccaucccccuacacauacacccagccggggccaaauuuauacuuauauaaaaguuguaaauaugugaaauuuuaucccugugcccuuuccccaccucaggcccuaccccuggacccuccccaaccuuccuucucucuucuuuggcuguuguaauuaucugggguuuguacuguacauauccggggugugugugugugggcugggggcaacccuucuguacagagcuuccuggcccccuccccccccgccccucugcuucccuccccacccaccaccucaaggguagggaguugcucuuccuaccuguuuuauuuuguuuucucguucucccuccccaccccacucccagccuuaucuauccccccucacuguccccuuuucuccacucccagccccauuuccuuuuuuucuggaguguguggugaaacagaaaaaaacauguuuaauaaacggagauuguucuuuua

SEQ ID NO: 9 - RNA, 33618 nt, Homo sapiens
ucucggcugccgcugcugccguuggcucuuauucuccuccuccuccuccucucuccuccucucugcuucucucugcuccucucuccuccucucuccuccuccuccuccuccaccuccuccuccuucucccccucuuucucccccucuuucucucuucuuucucccccguccccccgcccccuccccccaggccugaugagcaggucucgagccuccauccaucgggggagcauccccgcgauguccuaugcccccuucagagguacgugguggggggagggggagggccauauggggggcaacagggggaggggcagggggcgggggagagucggggccgagggaagggagcggcugaaauggagggagaggggaggaccgggaaggcaggggugggagcaaccgggaaggagggauuggaggccagagggauagggguagauaagggauggaggggccaggaaaugggccuugaaagggggcugaagggaaaaugaugaaggggaaagaaagcgccagaaaggggugggaagguagaaggauuggguuggggaaaaagcugcagaaauaauuugggggugggagcugagugaugaggaaaacaucaaggaaauagagggacagagucuugggagaggggcuaggaaggagaaaugaaaacauaggggugaaaagagaagccaagaagauguggggggauaauuuggugggggacucagaguaugguaaggggcggaaaaagagaggaggauggagggagagaaggggccagauggagagagagggaggcagugggggguggggggauggaggguccagauggagggaagagagaagagagagggaacggugggggaggggagaccagggcagggggagggccaaauuaugugugcuuggggggguggcaguacaaguaagaugaaaugaugggaguaggggacagguuaggauccugccccagacucugacccucuuaaaggcucuugaccaguaaaauguaaccucuggggucuuaaugcugucuucacuucaucacuuuuacccccuucccccaccccuccaauccuuauuuccauucccccucccuccucugcuguccaucaccuauaucuuuccccccauaugguguccguuccuuauaugagucccccuucuguccuuccccuauaucaguccccucucugguguucauugccucucucuuaucucuuuucuauguggucgcucccuuauaucucuaucacuucuuuacuaguccgucuugaccccuucucauagccuccgcauuaggucugccuccuuugcucugacacauguccagucgagcccuucagguguauucccuugccccugggcauuuaccaucauuucugccuccuuuucuaucuacuccuauuauuugucucccagaccauuccuugucaccacaagucugugccuacccacuuucccuuaauaccucaacucuuauuaucauuucucuuuucuugucuccucuacuuauugggguguuggagauuugggguacaaauacacagguuuugaugauuagaacaagggauccccaucucagcccuugagggauuucucauccuaguaaaaauuucccguuucucagccauguugcucugccucuugcaucugccucccagaaucauucuucaccaaguccagacaguauguguguguguguuucuagaguuguuccuaaguucccugcugccaggagaaagaugcccucugaagucuaacccgccucccuuggcugcagccugaaccagcccuuuccccaaaugcuuauguguaucaacagauuucuccucuggguauaccaagugucuaagugcggugggcauguugccugcaaugucuguaguuucagaggcuagguauuggugaucucuguaucuagagaacauuaguuagucucugagauggguugagauagaguuucaaaguaugugguuucuaaaugguggacauucugaggguucaucgcucacugugaucuggagguuggguaaauuugagagacauauuuauagacagaaaagggcugaauuugcaaaacucugcuacucagugcauucuguuggaaugaagcucaaagaccaguucuccugcaguauacucaugguuaucccauaaaggugacagaguuugaucuuuuuuccaucuaaaaucugauaccuuaagccuaauuucuagcucuuugcugucgccaaugugacaucucucuuacuucaauagggccuguguggcauugggguuuaaaggagaggcaguuugcagggagagcggcauggcaagaacaacagagcuggggaaggaggacccuggucucaucucagccauaggcgacacuuggucuacuguucucucuucucaaaguuuuguucccaucuccagcucuugucuuuggaggccccucugugucaccaggccuggauauuccauucuuucccccugacaucuuucuuccucaagcuccucacugugccuugagaaggcuccugaccuauggaguggcuuccauccuguccacugagacuagguggggugagguggugggggcaguguugaaucucugggcacugaaugggagaagagauaaauuuggucucuacuuguccaaacaagggcauauuucccaccuucugcccuggggccuccacagccagaugccgacaaaagccaucuucuccuuaccaccagaagaaccagaacuuucccuaaaggaugagcaggguugaacuaggggaggagggcacagaggagggaagaguugggaggggaggcccucucaugucucugacugugaacagguaagcuccccgacuucuucuuuucuagauauuuagcccucagaaucucaugaucccaauguuccuacacacacaccccauccuucuuucccacagccauguagcuuuccucauacucuuuuauagagggguggugccaccuuccaaguccuugucuucugcagcuauuuggaugccuuccucuacccagauaucugacaccaacuucucuguuuuucuccugccaauuuugcggcaccucuaccuuauuuuccugaaguagauggagagcuccuucaucuuucucugcccccaaacguguaccuucucugucauauaauucccaucccugaaccucugcauuucuucccccaagucuccagagccuucugugaugugauccucuccucuuuuccccuuuguauaaaugcuugucuuguguuccuuuagaguugccaggugucucacuuucaacugugaucuccugaaggccgguaggguccccuucucacuuuguggacucucuucuugccauuuuaggccucugcuuccaaaugcauagagccucccuuacuguuucugugugucucuguccuccagauguacggggacccucuaugcaccgaacccaauacguucauuccccguaugaucguccugguuggaacccucgguucugcaucaucucggggaaccagcugcucaugcuggaugaggaugaggugaguguggugagaaggcugggaaaacgcaugugggagaauggggagaguccucauuagugaaggggagagagacacaaagaaggcagacaaagaagaaacauuugcaaauggcaggaggguggccauugagacuuggguuggagugugacaagagggguagucauucucucaucuugggcagggagucuuugaggguuaugagcuguguuggggaggagaugugguucugaagauuucggggguggggaggcuccuguuuucacacuguccauauuguaggauagguuagaauggggaaggggaacugaaggguuuggagaaggggugaagacauggaaggcccucccaaccaaagcaauccucaggaccccucucugcuuugcccacugagcaagacucccaguccuuucuccaucagggggcagagugcaagaagagaaauugcaggacgcagagaaaaggcaggggauagaggagguuuuagguagcuggaggauacugggaaagaagacugaggucaguggaucuuggcaugauggggugaagacugggagagugauugagaucaagguuuagagagacacugagagggcuucugcaagggagugguuggacaucaggaaggaauauaagggaggggaacugggaguauguggaguuaucuaaaggaguacaaguggaguaggggcagggacuagccagaguaaaggagaugaaacggacagaggccucuuaugggaggugguggccagguauggagaucugagagccagggaaguguggguucugauuugggagcugggucagcaggaguguccauuggaggaaauagaggauaaaaacuggaauggugccccacaagugugagucagggaaugggggugauuugggggacaagcuuuaaaaaaugguaggguagccuggaaaaccaaacguggugagagauggacccugaaaguuauugggaauggugugaugaggaaggguuagaauuugagucagggcuaacuagagugucaagggaccuaugggggcaggugagaguguggagagauggcuggguagacagcuuccaggccacagaguaaaguagagguguuaaggagaggauauggugacuuugaaaggagagguggcuuggggagucuaaguuuuggacaccauugggagacauuugagugacuguggucaaaccccuagaucaagguuuggagucuguaggagaaaugggggaaacuggaacccagaguggggacuguuauagggaugaagagggaagacaauggauugggguaaugaaggaaugacagagauagggacagacugaagggaccaguggccagcaaguugaggggcaauaggaauggccggucuggagcaggaagggcgugugugugggaggaggaguagauagaauugggaaaaugagcagccugaacagacgcagggaguuggaauuggaugggugguggaacuggggcugggggauagugaggggucuguuccuguggcucuuuguagagguggaggagacugcagggguggagguguauggagguagggauggagguggacagggggagcugggugugaagcuuagggaaaggugauggcugaggggaagaagggaacugagagaugcugggucgggugauggaaggagaugaaaggugggggaaggugaccaggcccucuggcgggaggggagguugggucccagucuggccgcaagccgggccgugggagggagacaagcuguggauccugauuauaaaugcagcuucugcuacccccgugacaggcucggagggagagaaggggguaagggaggugggagguugggaggaaagcagggagaauggaggaacugaaggucaagggaaaacuggauucaggaaguagcuaacuucugaggaguugcagaagagcugaguaggguuugggagaauucuccggaagguguuucaagacaaauggagggagaaaagagggugggacggcaaagaaugagagagagagacugggggagagaagggagagauccagucaccaaguguggaggggccggggcagaaaaagugggcaggcuuagggggaaaaggaggcccgcccuuccugggaggaggcggaggggggaagagggaggggaggggcggcgugggccagggaggucugacacacccccaccuccccuagauacacccccuacugauccgggaccggaggagcgaguccagucgcaacaaacugcugagacgcacagucuccgugccgguggaggggcggccccacggcgagcaugguacggcggccgagcaggcucucaugacccggacaggcgcggggagagggcugaagauggaccgggcuggcggggcgggggcgucggggagcggcgggagcuggccgggggcgggagaaggcggagacaaagucuugcuucccgaggggagauggcgcccuccucuggaagguggagcgggacaggggcugugggugagaggccccuguggguccucgcucggcuucgcucccuuucuccucuccagcagugaaguuugacuauuuuccuggugcuuguaaaaauagucuccuuagaucuuuagcuuccaguccguguguuccugccccugccccucccagccccuggucugggaucuuggaaagaaugaccuaguuccugcccuccccccagaucucuuccccaccccuaugcuccugauucuucuuccggaccuucaguccuugaggucuccuuuuauuacccccuguuuucuccucucaucagcugcuucuauuuucugcaauuguaucacccuuucucuuuccucccugauuucucuuauuuucuguaccccucuugauuaccccgucgcuccccucugcucccggcgaaaguccaucagacucccaucucaucuccuuucugucuguagagcuaucugcgcggucugucucuccaacucucucccucucuccaucugucucuuccccucccucccccuuucugcccccccaacccccucuuuagucauuuaaaaaaagauuuuugucuuccugagaaguucgcuuaaaagguuuccaugggaacagugaggggagaugaaggcagagaacagagaucugcagccaaggugcagagagacgcccucagcccccggaaacccccucgucacugcccccuuccacuucauuucccuucccggaccuagcgauccagguuccccauuccuccaacccccaggugaccccuuuuucccaccagcucccccucccuucaggaauucaagcuaccaguuucucucccuuagagagccagugaccuguccccauccuuuggcuccuuccagccuucugauagguccaggcccuacuagccuugugggccgguuuggggaccuuggguggguggguggguggucagggaugugugucauugucauggaaaccccauaccaucgggguguguggguagcacaucucugugaggcaaagucagguggugguggaguguauacagagaaugugugugaugucugucacaucuguguguauauguauauguguguaugucauguucaugucuggggaagauguguguguuugugugcauguguguacaccugcguuuccaggccagaauggucacaugcucacagagcauguuuaucauguguccugugguuggcagaucugcccacuuauuccccaucuuucuccuuauccugaguccucagggucuaggggucucuggcgggggucucccguguguuuuggguggggacaccguguguguuuggaguugagguggcauguggagguugcuguauugggguucaguaggggcugggagggguuccaggggcauauguauuuggggggagggcuuagugaaaguugaugggggugaacguuuagggucuucaggcagacauggaauguguaaagggcauggaggaugugcaguggacauaggggucguugggaccuuggggacuuggcaaugccaagguguuugcugaggcuguggacucuccagcccgggagaggucgccggaccuuugaggggcauuggaauccugggcuccuccucugcuggguggagccgcgaacccucguucucuccgcgguuuuguguguguggggggguccugcucaggaggggaugguggguggccugguuuguuuuggggguccccuugccccccucccccgucucucucgcgcugucuccgggcgacagggcucgugacagaggcggccacggcagcagcggucgccuagcaacggcggcggggcccgggcaacggcggcagcggcgggagcggcggcggagggagccguucccgcggccgucaccgcgcggccgucccggccgucccgggccccgccgccgcccccaccgcgccgggcggcgcgagccgggccguaccgcccccucucccuccgcaccccgcccuucccccgcgcaggggcggggccccucccccaccggggacaccccuggcccccccggggggcggugcgagguaagggcggggccgggcggacuaggagcgcgcguagaggggggggcgccgcgcgcguggggcgggggcgcgcgugugcgugggcgcggggagggggguggggaagccgcgguggcggcggcggcggcggcagcugcucccuccgcauguucucgcugcaucuuccgaguggggggaguuaugguaaccggagggggacagcggaggacgggagggucggggaccggccucgugcggacagggucuugagcacgcgggggcggccggugugugugggaucuuggagccccugguggaaggggcagcccguguguccgcguguguguucgugcccaugcucgugucuccugugugucggugccaugugcacacgggggcccaguuccucgugcacacaugugcagccagccuugugcaaguguguccugucuuaucuugccucugccuguuuccugccuagggggcuguugggccagccacgggcuuguggggcaguccgcggccuugcugguccaugucaccucugacccugagcaugcauaucccuggcuggggcucaccuccugucaggcuucugugugugggaauguguggcccuaugagcaggauuuucugugucccugguggcaggugugugucuuugcauguguguuccagcacuggccugaguaucugugucaaucccagcauggguguccagggcgugucuggaugugggugguguggcuggggggaguaagugugugaauguguuccuuggaauucuacuguguaugaaacaccuuugggcugggcagguguaagcccugcuuggucaguaaguggggacagaaaagcuuaaaaagggaagaaaugggguaaagaggaaaaguggggaggggauaggagagaaggaaugagagaggcuugaagaagagagcagagagcagcaggccagggagaaagaauagcuggagaaugggaaugugggagaaagccaagccagacuuagaagagagaacaggggauaagagcuuaagauggggaacuggauagagauggugggagaagaaggggucugggagcuggggaggcaguggggaggagagagucaggccuucugguaaagugaucucugaaagaagaaagggaagaagaugggagaaggcacuggauucuuguaggccuugcaggaucaggcuugguuuuggaucagggaaggccacucaggcauacgggcuggcucacagugaggccugucauagcagggacugucauuagagguucauauccccagcacagagcucugucucccauuucucugcucuguguccaacccuguucuucgcccuucucuggcaaccucccuccucuggcuccccuugagagcugccagcuggguguggagaggaagaaaggccaaagggaagguuagggauuuggagggcagggggagauucugugggugauggcaagauuagagauguuggaggggcaggaguccaagcccuugcugugugugugugagugccauuguguguguacacaggguguguacaugugugggugugugcacaaugccuguguuacggguuuguguagguggcuguuaugugugugcaugcguguauacaucgugcaggcaugggacauggagacccaggaucacaguuugugcuuuucagguuugcuguguguguguguacacggguguguguuguuuucucuguacaugucacugcaugcagcauuaauaacaggauguucuguguuucugucacucugcccccccuuuccucuguguuucugcuauucuuuuccugcggcaacaaaaguguuuaauaagcauauguguauguggccucuguguaccugugacuuaugagugaguucauggaucuuaguucuugguaauauguguaagguuauauuacuuccaagaaccaagcaagccaauuagcaaauuuguucuucuguuaaugcuuuaguuccaaagcggaauuuuaaugcauuuaaaguuagacuuuaugccuuuauuagaugagcuugcacaugaaaauaauggcugagcucgguucccugaaaugagagugaggcagccauaccugagaaaugcagaaaaaauguuacuagggaagagauauccugaaccauuggaugcauugcuuaguguguaccagaaggauaauuaacacauuugcuccugguuuuucuuuacucugguggcaaucucggaugccuguguuagagugagagaagggcugggggaggaaaggggguuguccugagacagaguggaugugguuguacuuuucacgugaaugaaaggauguuugugcuucugagauauggggauaccuuucuguggucaggaucaugguguacucaagcauguauuucagggguuaaacuggaauuccccugcauggggauaugugugucuuaggguuauagguccauuucuguagugugcuguccacaugauugcccaagagacuugggccacaaaguccacaccagcagcucucaugugggucacuggguucaaguauguacucccuuguugcagagcucacauaugucaaagcauguauccuguggggugugugggccucagggucucagaauguggauccgugcuaugcccgugcucacaguugucuguaugucucaaaagcacauagauccccaguuauuuuucuguauugugguucucauauacacguaccuccacagcucaguauauguuucuguacuauacaccuguuccugagggagugauaggguucucgugucaugggguccacauuuuuguaugcaaaccuccuaacaccuggguuuuacagguaaagggaagcugaggacugauucuagggcaguuugcaggcaauuugcaauucuggaagcagacagugaaaauauaauugugguccucccuuguucuguucuggaaccuagaggguuaacaggcagcucuuccgguccaccccccuccuuccagccuguagcuucuuguugccguggagaugguggccccgccccgaugcagcaccugcccccccauuggcugcaguggugacuguggggcugaggggggagcccaggccugggcagccauucuggagcuggagccggagcuuggcauccccccacuuacauucucuuccagccccucggccccucuaaauucccuugcagccgagccucagcuuccuuuuucagcgcuugccaucccucuaggcucuuggcagacugagcugcauccgcauucaccuccccuccuccuccuuucccuauccuuacuugggagucccgagaacccccacuguccauccuuccugcucccugcccauuccccugcauucuuugcuuuuccccuccccccaccaaccuucugagccccugccacugcagugcacguggaaccggcuccuucucccuuccccccaccugccccuuccuuggauuuucuguccccagcuucucccccugcuacucuucacaggucucuuccaagaccucccccuccaguccagggagggggucaugggaggcagcccuggcccuccagacagacagggguuccaggagguggggggcagguggaagaugugcccaccagggggaagaggaaagccugccuaugggcaaugaccuuuaacccaucuuuccccccagcuagccccuucuggggugggugggcaccagggaccuagccucccuggaucuuugguguccuucauuacugggguuuuacugacccucucagucaugcuccccugcugacugccagccccagucaugggccuaaggccucccaccccaucccccucagggggcuccugcucagguuccuugcccccuccuucccgcugccagccucuccgccgucgcugcucuuccugcugcuuuccgggggguaggugaggccggagcugaggggcagagggaggugggggcaugcacuggggucaggggugggaaccuggguuaacagcuucccuucuggcccccuccccaacuucccuucuggccauuuccuccccuccagaauaccacuugggucgcucgaggaggaagagugucccaggggggaagcaguacagcauggagggugccccugcugcgcccuuccggcccucggugaguggugccuaccagauguggcucaguugggcccccuccccuccagccccaacuggggcccuaggagucugagaaagagggcaggagggggagagagggagugagagugagaaaaagagugugugucugugugugucuccccaccucuuugguuucccccuucuuggcucugccccccugcuucugagaccagcccucccaccuucuccaagcuguguguguguguauaugugugugugugugugcuugcacuguacccgugggagcaaggaagacaaacugguauuaggguuccuaucccccuuuccucgccucuggagacuucccuuuuccccaucccacuuucauccaggggcucucuaccagcugagggaugaguagguagaacugacccugccccaacccaccccauccccauuucccccccagcaaggcuuccugagccgacggcuaaaaagcuccaucaaacgaacgaagucacaacccaaacuugaccggaccagcagcuuucgccagauccugccucgcuuccgaagugcugaccaugaccgguacaggggcuggagcaugugggaugagauugauguaauguagggucuccugugugagaugcagagggaggggguuaucugugugcaaagguugaaggauucaacucaaguugguugggggaugucauggcacaggggacagaacagaaaagaacuagaauagggaucugugagcagcaggagagggguaggguggcagagagaagacagacagacaggcuggaaagggaaugaaggugaagccaaggagggacuccucagggacuccucaggccaagaaggaugggcucuagcccaggaucaaaggagcuguacaggaggagagugacccuggaggaauguuuaaggaaugcagggaagggguugguaggugagugagcaauaggcuguagguggaagggugucagggaaggucaggaaauacaggggcagcagguuggaguggggcuggggguggcugaaugaauggaugauggcuagggcucaaggaccucaucagugagggaagagacaguauagagcauggcagagaaggggagggugggacaggugugcagggugacagaaugggaagcaacccauggacugaggcaugaagaagcagccagcggagaaguccagaaggcacugucccugagaccaggcugaaggagaccuccacuguuugccuuuguugccugccauuugggguuccucucuggguuucccccucacccagucacuccccagggagaaccaugcccucccuuucccccaugucuggccacccccaggauugggcagguagggagguugggauaaagugagucacaccuuucccugccccccucccauguugccagagcuggauuuggggccggcagggggugagggcaugguauuccuggccgcgggggcggggggggggguccgggggccgggggagcgucgcgcugacggcagccagagccugcgaugacggggcugcuauaaauaacuucuuggaggcucccacacccaagcuccccucccgcuuucccacugcucucuacucuucauccccugcccaucuccauaccgcuuuuguauugcuauccuaccccucauuauuccaugccccuagcccccuuuaucuucugcccuccugcagugauuuuuuugcauuccauccccucuuagcccucaccucgguucucccggccaucucuccaguuggccuuccuccucuucuccuguccucugucuugcugcacauaccuuugucucccccuuucuucuucuugcccuaccuccucuucuucccuagucccuguauucugucuuuuauccucuuugagcucuuuucugcccacagcuuucuccuauuucuuaugcuuuucccucacucuuuccccugcuucugcuaaaacuuguccucuuaugcuguguucauucauucuuugaaucauuaaauguuuaucaggcacuagccgugugccaggcccaggcuagacauaucucuucucugugccuucacuucuuuacuuccacuuuuuccuuuauacugaggcucugguuucugggguuaccuggagguacuaccuagaagugccccaggcccacuuuguucucuccuuuuuuuuuuuucuuuucugccaugguccauuucuggguugagauauuucuagauguccccaguccucgcaaucccuuaggugugagauggugggaguuucuuuuuuuuccuuuuuuuuuuuuaaauagaaauagggucucacuguguugcccagacuggucuugaacuccugggcucaagugacccucccaccucggccuuugaaauguugggauuacaggugugagccaccaggcccagguggagcaggggaguuccuuaaaggauucugauuuuucucacaucccucacguccuuccugauaggcaggguuucuuucugugucuguuugggaaggguguucagggggccuucucuccaagucuccauccuggaacagacugaugaugcaggguaccuaugugucuaagaagaguaggggggccgggcgcgguggcucaugccuguaaucccagcacuuugggaggcugaaucacuugaggucaggaguuugagaccagccugaccaacagggugaaaccccgucucagcuaaaaauacaaaaaaaaaaaagaaaaaaaaauuagcugggugugcugaggcaggagagacgcuugagcccaggaggcagaaguugcagcaagccgagaucacaccacuguacuccagccugggcgacagagcaagacugucucaaaaaaaaaaaaaaaaaaaaaaaaaggaagagugggaagcccugaucccuuccucuccugaaccuccugccugccagggcccggcugaugcaaagcuuuaaggagucacacucucaugaguccuugcugaguccuagcagugcagcugaggcauuggagcucaacuuggaugaagauuccauuaucaagccagugcacagcuccauccugggccaggaguucuguuuugagguacugggucuggugggcuggggagggccaaaggacaggggugauggaagguggggggcagagaggucuagagaaaguggcacagguggggacaucaaggaaacagaaacuucugggacuggaggaaaggguaggccagggaggaagagaagguagcagagucuccuccccucuguagcccuuucccucaacuccacacuccuuucuagguaacaacuucaucaggaacaaaaugcuuugccugucggucugcggccgaaagagacaaauggauugagaaucugcagcgggcaguaaagcccaacaagguauuggggaauaaaggggacacaaccuguguagggcaaagguugcaccaacacgggaagcugggggccuagggaggaaagugaguuaaaggaggagaggcuuggggaaggagaggauugagguacaguguaucuggacaagcagggggagacccccauuauucugagucccccauuucuuuucgcuuucuguacugcuacccugccuuacgaucucuuucccugccauagaagucauagacuuacagaguugauggggcucuggaaauucuuuagucuagcuucccugcaggcaggaaugcuucacuaauaccccgcaggacacaucaaauacacuuagccaaguuucuguaccuugguuuccucucuaagacagagggaacugguggcaauggguuggauuaaaugaucucuaaggucccuuuggcacauaaauucuaugagucuguucuucccaaaacuucaugcuuccaguucugucagcuauucucuguaucccaguuucuagcaagcuuacaguccuagucacacuccucuggggggaacucuugugucuugauguccuuaaagaacucaacccaagaugcugacaugaucugaccuaugcagaguacaaacaccauguucccuuucaacacacugcaauaucaccugagccuuaccauuagcuugugcucaauuguauccccccaggcccuuacugauucuuuuuuuuuuuuuuuugagacagagucucacucugucacccaggcuggagugcaguggcgugaucuuggcucacugcaaccuccgccuccuggguuuaagcaauuccugugccucagccuccccaguagcugggauuacaggcaugcaccaccacacccgacuaauuuuuguauuuuuaguagagacgagguuucaccauguuggccaggcuagucucaaacuccugaccucagguugucugccugccucagccucccaaagugcuaggauuacaggcaugagccaccacaucuggccaagcuuuacccauucuauaugcaauucuuuuuucacaauuucugauagucucugcaggacuuuccaguucccuucaaauucuacauuaauauuuuuggcuuguuauuccagcuuuugaaaucuuuccaauacuguuuguguugucuaguguaugucuacgcuucuacaguagcuuccuggggcugcuauaacaaacugcuacaaacugggucacguaaaacaacagaaauuuauucucucacaguucaggaggcuggaaguccaaaagcaagguaucagcagggccacgcucucuuugaugcuguagcagggaauccuuccuugccucuuccuagcuuccggagguugccagcaguccuuggcauuccugggcuuauaacugcauccgucuaauuucugccuccaucuucauguagcuggcuuccuucugugugucucuguauccuguaucucugugucuccaaaucucccucuccauauaaagacaccaguuuuuauaagguggguuaaggguccacucuaauucaguauggccucuuuuuuuugagauggaauaucgcucuuguuucccaggcuuggagugcaauggcaugagcucagcucacugcaaccuccgccuuccagguucaagugauucuccugccucagccuccugaguagcugggauuacaggcacgugccacuaugcccagcuaauuuguuuuuguauuuuuauuagagacgggguuucacuauguuggccaggcuggcucgaacuccugaccucaggcaauccacccaccucggccucccaaagugcugggauuacaggaaugagauaccauggcuggccucuucuuaguuugauuacauuugcagggauccuguuuccaaauaagaucacauucacagguucaggguagacaugaguuuuggugggauacuauucaacccaguacaccgucucaccuuaugauugcugucuguaucccacuuucuuacugucucuccucuuuuggugucucucugucccuucccccuuuaacaucaugcccaccccaccaugccaggacaacagccgccggguagacaaugugcuaaagcuguggaucauagaggcccgggagcugccccccaagaagcgguacuacugugagcucugccuggaugacaugcuguaugcacgcaccaccuccaagccccgcucugccucuggggacaccgucuucuggggcgagcacuucgaguuuaacaaccugccggcuguccgugcccugcggcugcaucuguaccgugacucagacaaaaagcgcaagaaggacaaggcaggcuaugucggccuggugacugugccaguggccacccuggcugggcgccacuucacagagcagugguacccuguaacccugccaacaggcagugggggaucugggggcauggguucgggagggggagggggcucgggggguggcucagggggcaagggcaaaggagguugcccggcugugcggcugaaagcacguuaccagacaaugagcaucuugcccauggagcuauauaaagaguuugcagaguaugucaccaaccauuaucggaugcugugugcagucuuggagcccgcccugaaugucaaaggcaaggaggagguugccagugcacuaguucacauccugcagaguacaggcaaggccaaggugaguguugugcccucagggaaaggugacuugggaaugggcacuugcuuggggguuagugaggacagggcaaauucacgagauuggguugugcagaggcugacacuuggauuuuccugggccucaggacuuccuuucagacauggccaugucugagguagaccgguucauggaacgggagcaccucauauuccgcgagaacacgcuugccacuaaagccauagaagaguauaugagacugauuggucagaaauaccucaaggaugccauugguauggcccacacucaggcccucuucuucccaaaccugccagauguccaccccagaccccaaguccacccuuccacagcuugauacuuccuaacccagaguccuaggacuccagccuccaacaccugauucugaaauuuccccaacccuggccacccccuucccugcccuuggaaagugugaccacacccucuugugcccccaccccccaggagaauucauccgugcucuguaugaaucugaggaaaacugcgagguagacccuaucaagugcacagcauccaguuuggcagagcaccaggccaaccugcgaaugugcugugaguuggcccugugcaagguggucaacucccacuggugagacugggaacgcugggcuggggggccagggucgggggaauuauguguucaucuguucaucuaucuguccauccucaaagaggacugagcaccauuuaugggcaaagcauuguucuaggcgcuauagagcaaacaggugaaagaggccuggucccugcccucagagggccuccaccagaauggggacaaauuagaagaaaaaaaaaaaaagccacagagccauaaugguguguaagugcugaguaaggguccccccaaccucugugugacauaaggucagagagaaggcagagcuuugagauaaguggggaagaggugcccccuuggguaggcuuugaagacugguuuagguucugauauauggacauaguuggcaagaaagacauuucagaagaaggcugugagaaaggcacaugugugauggugaaaaggcccaggaguuuucaggggacauuaaaguagguuaguagcaauuacaucagguuuaguggagcaugugccucauaauggggaguggcgggagagaugucugggcaggaagauuagcuuuagaaacuggaaggccucaaggagucugaggucauugguaggccuugggaugccauuaaaggugucagaaauauugugauuuagaagauuaauccauaggcugggcacgguggcucacaccuguaauaccagcacuuugggaggcugaggcgggcagaccaccugaggucaggaguuugagaccaggcugaccaacauggagaaacccugucucuacuaaaaauacaaaauuagccagaugugguggcacaugccuguaaucccagcuauucgggaggcuaaggcaggagaaucacuugaaucugggagguggagguuguagugagccgagaucacaccauugcacucuagccugggcaacaagagugaaacuccgucucaaaaaaaaaaaauuaauccauaaguagaguguauguaguagaguagagggauguauguugggggaugacuggaauagagccagcugggggcucggaggcaugaaagucagauccugaaucagaacagugacagaaguuaggaaggagcuacuggaaggacccucucgggaaaggaucaguaggaauugucagcuuauuggaaaggagggagcaugucuguggggagucacggaugacucaagaggccaugaggcuggugguugggagaccgguggccucauugacaaccaggaaagucaggaggaggagccaguuggaggugugggggcgauggugagcucugcuuuacaccagccgaguuuaaggugucagugggacauugaaguggaacugggaggugcggggagugagcucugagccauuccagggacuggggaucaugccuggggcaccuccauccccauuucccuggaauccagaagaguugggggguccgagcucccuguaccucaagugacccuccaucucucucccaucucugucucucccuggugucuguuuuucuucuccuccucuccuugucucucucccacaccccuccaucucucucccacgugucucuccccucaccuucucucccccuccauuucucucucccuaaucugucuguucccucugccauggcccccuucuucaagcagccucccaucuugcuccugcggucccuccuucccugucucucucaccccuguuuccacacccucaccuccuaccaccccccucagcauguucccuggaagcugagggucucuggggcucagucccggucucucucuuucucucucucucucucugucuccccgacccuuccccccagcguguucccgagggagcugaaggagguguuugcuucauggcggcugcgcugcgcagagcgaggccgggaggacaucgcagacaggcuuaucagcgccucacucuuccugcgcuuccucugcccagcgauuaugucgcccagucucuuugggcuuaugcaggaguacccagaugagcagaccucacgaacccucacccucauugccaaggucauccagaaccuggccaacuuuuccaagugagggaagcuucaggagugggcagggcagggaguggcagggcagggaguggcagggcugggggucggcaagaagggucuccugaguccccagagauccugagauggggaggcuaugauaccuuguguguguguguauguguguguauguguguguguguguguguguguguguaugugaccuuuaucuucugcauucuuggcuagguuuaccucaaaggaggacuuucugggcuucaugaaugaguuucuggagcuggaaugggguuccaugcagcaguuuuuguaugagaucuccaaucuggacacgcuaaccaacagcaguagcuuugaggguuacaucgacuugggccgagagcucuccacacugcaugcccuacucugggaggugcugccccagcucagcaaggucagcagauccccucuuugcccuauccccagauggcuccagagguuccuggagccugagaaacuacccuuugaagauuuuuuuucuccccuuguuucucgaggugucaccacuacuaucccaacucaggcccccuccaccugcacccucagaggcccucuuagagcugggcacugagcccccagguaacagccucacccuuccaggaagcccuccugaagcuggguccacugccccggcuccucaacgacaucagcacagcucugaggaaccccaacauccaaaggcagccaagccgccagagugagcggccccggccucagccugugguacugcgggggccaucggcugagaugcagggcuacaugaugcgggaccucaacaggugagcacccugggacagccaggccugugcccuaggagcccuucuccuauucuagauacuccucacugggccccacaugcaucucucuagggcuugaaagaagggaggaaaaagcaccaaguucucaggggagacgauaaggagacagguacagucagugguaggcugagagcccuuuacagccugagggagugagagauuuggagcucuaggaauagggcugaggcuccaccaacucacggcuuaguuguaagccuagagcaucccugcugcaagcucugauuugcugucccucugccugcccaugcuaguccccaggcugagguucagccagcaugucaugucagccaugugucaaaauguucaaacaucucaguaauagcuagugaauaagcacuucccccagcccccgaccacaaccccacagaccuccccaugauccagcacuuagagcagugacagcagaagccuagcagggccugcagccugcuccagagucccagccuccauucugauagguggugcccgugcuucauuugcugcucauuauuuugaugauggcccugcuuuuuccucugcccgugucuuccuccaugacaccauacccaucccaccauucccgccucuccuuucauuuguccacaucucucuccuucucugucugugcucgccccucuuuccaucucucuccagcuccaucgaccuucaguccuucauggcucgaggccucaacaggugaggggcucuccccucccccgcccuccucuccucuccugucuguucccucucccacuccacuggccuucgcccuacuccucuccucuccuccuccauggaccucaucuccuccauaugugcccagcccugcccccaucccuucucuugcugcccccaucuccccuccucuaggccucacccccuucccggaggggcccuguccuuucccuuuacucaccuguccccucccauccucccugccugcccucuucagggcugccaccgcuagcucucagcccuucccucugggucccacuuuucaccccaaggccugugccagaccacagcaagguucaauugcuaggagcccugaccuuaccuucugcuugugugcccccuucccuucugacagcucuauggacauggcucgccuccccuccccaaccaaggaaaagccacccccaccaccgccugguggugguaaagaccuguucuauguaagccguccaccccuggcccguuccucaccagcauacugcacgagcagcucggacaucacagagccagagcagaagaugcugagugucaacaagaguguguccaugcuggacuuacagggugaugggccugguggccgccucaacagcagcaguguuucgaaccuggcggccguaggggaccugcugcacucaagccaggccucgcugacagcagccuuggggcuacggccugcgccugccggacgccucucccaggggaguggcucauccaucacggcggcuggcaugcgccucagccagaugggugucaccacagacggugucccugcccagcaacugcgaaucccccucuccuuccagaacccucucuuccacauggcugcugaugggccaggucccccaggcggccauggagggggcgguggccauggcccaccuuccucccaucaccaccaccaccaccaucaccaccaccgagguggagagcccccuggggacaccuuugccccauuccauggcuauagcaagagugaggaccucucuuccgggguccccaagcccccugcugccuccauccuucauagccacagcuacagugaugaguuuggacccucuggcacugacuucacccgucggcagcuuucacuccaggacaaccugcagcacaugcuguccccuccccagaucaccauugguccccagaggccagcccccucagggccuggaggugggagcggugggggcagcgguggggguggcgggggccagccgccuccauugcagaggggcaagucucagcaguugacagucagcgcagcccagaaaccccggccauccagcgggaaucuauugcaguccccagagccaaguuauggccccgcccguccacggcaacagagccucagcaaggagggcagcauugggggcagcgggggcagcgguggcggaggggguggggggcugaagcccuccaucaccaagcagguaggugaaggcaggaggaaggcgggcugggucacaacagggagggaagaaggagauggggggugggguugaaacagagucuguggccugaaguuacaaucuucuugccuccuuuuggccauuaaacaaauguguauagagggccugcuaugugccaugugcuaugccaggcacuaaggauacggcacugaacccucuuagcacucucauuccagaggggauuaauccauaaguagaaugggggugacuggaauagggccagcugggggcuuggaggcaugaagaucagauccugaaucagaacaacaggagaaauucucuggcauucaacucacaucucuggcauucagaggugauaaaggcuacagcagggcaauaggacugggacugucgucuccuuuggcugugcuguugcccucuaaauguacccugcuuuuucccaccuuuucuuucucuguucgcccucacugugccuugucccagcauucucagacaccauccacauugaaccccacaaugccagccucugagcggacaguggccugggucuccaacaugccucaccugucggcugacaucgagagugcccacaucgagcgggaagaguacaagcucaaggaguacucaaaaucgauggaugagagccggcuggauaggguacgaugggcucuaccagcuccaagccccaguguuuccuuuuacccacaggggagaucucuagucacuuccaagggaaaccuccagggucaguuauggugguaagaaaaggcaaagaccugaucaccucuugagaagccuuccguccaucuggggagaccagauacacacaguuguuaaaagucacuuucaacucuauuuuguagguuauauauaucauagacuaucuggggaucaucuauuuuaggcuuaccuccauguucuuccccaggaggaacauaagcccuggcuccugugacugcuuaggaaaggaaauguuacuuuacuggcaguaggagcuaauaaauuggauggggauggaggggguugcagcuauauuacaagugaugucuggccuacccagucacugucccaugggcauaagugacagucagugggcagggaaugcaugugguaaaguaguauguaucagucaugugugaaaagaccauccagacccucacuugguggaggcugagggcaaagggcaccaagagcucuggggcuaacacagauaacuuagcagaaaguuacuugaggaagcuguuguuccuagggccugaggaagagggcggcugcaggauuaggucauauauaaagaacauaugauccuaacacggggaaguggucuuugagcauaggaaauguugggacugacucagaugggcuugaccagcaaauuuaaugagaauuaaacccuaauauuagccccaaggcagccaccguaggaaguuaauucacaucucuccucugcauguagaaggguuggugauauauguauguauccucuucagagaaugaggaaauagucuuuugaaucauuuuuuuuuucugugcuucagaugaggaaaccuuguugagaaaggcuguagacuagcacuauccaauauaacuuucugcagugaugaaauguucuguaaucuguaguguucacaugugucuaguugugauucaggaacugaauuuuuagaucuauuuaauuuuaauuuuguaauuuuuuugagacagggucuugcucugucacccaggcuggagugcaguggugcaaacauggcucgaggcaaccuccgccuccugggcucaagacauccucccaccucagcccccugaguagcuaggacuacagggucgugcuaccaugccuggcuaguuuuuuuucuuuuuuuuuuuuuuuuuuuuuuuuguagagacgggguuuugccauguugcccaggcuggucuagaacuugugagcucaagugaucuaccugccucagccuuccaaagugcugggauuacagguguugagccacugugccuggccuaaauuuuaaauagcuacaugugggcugguggcuaccauauuagacagcacagcuguagacucuagagccaauagggcagauaaaaugacucuucugagcucuuccagcucuggaauuccuagauucucagccuagaauucacuuguagaccuccuauccuuggcaccuugacagagccaaggagagggucacauggaggacagcaccugccuuucccccgucaauugccuuuucuuccuaugucuccagcauguguucuggggccuggcuuagggcugaagagucacccuauuuuuaauuucugagcacaguuacucaagguguguuugugaguguagguuucugugugggucuucaugaggggccauacauagaccucagggugugggagucugugaccuugcuccauuuugagggaaccucagcaccauggcagggucuucucaaaagcagguguguggauaugauccacaggcagggaagggguuggggaaggcagcuggaugucccucaacaugcaguggcugugcuuggcagacagggauggaggcuggguggugggcuugggguggggcgccccucauagugcggggucgugugcccggcgggcaggugaaggaguacgaggaggagauucacucacugaaagagcggcugcacauguccaaccggaagcuggaagaguaugagcggaggcugcugucccaggaagaacaaaccagcaaaauccugaugcaguaucaggcccgacuggagcagagugagaagaggcuaaggcagcagcaggcagagaaggauucccagaucaagagcaucauuggcaggugaggggcggccuggggaggggguugugagggagagccugaggcuggagagagcaagugggcgagcuacuccucugacucccauccccaaacucaggagcccaccaggagagcccaccacucuccuccccaggaagccacccacucacucaucaccagauggagagaaaccccaaccugcuuagugcauuaaauaucucuuuaccaaacccugaccucucuucugauagaguagcuucggaagcccuuggaaaauguaccuguuccuguccaaccaucacugcauuugcauuuacccuaggccagagcuccccacuaguuauucucaacuuaaccugugauguucacuccaaaccuaagcagggcucccuagccagaguaggcccugcccuuccuggguggacccucccucucuagccuuggaaagguguucuguuagaaagggucuuuuagccuguguauguuuucagcugcuccagcaaguccugggcuccaaagaggguauccucagcaaagaggucaauuaucuucagagugguggggucggggugggggggacccugggcgcacuccaaccagagccaccuccauuuugauccauucuaaauguauuuuauguaagauuuaauuagaagaaaagggcuucuugaaauauuuuuugaaaaccacugcucuaauugauauccuuuaugauaaaucaccucgaggaucuucacagugaggugacaugggggaugcagaagccagguccucagccauggaaggucuggggaaggggcacugcuguccugauugggacgauggaggccuggaggugucuggaugguagaagucuuugaggcacagaaagcugccuuagcagggagguguaaggguuccugggaggaagguggagagcaugauccugaggaacagggagucuugcaucacggcaauggagggacucugauucuaagggauaaggaugccugagguuuuuccagagagcuaugggguuccaugggcaggcucugagccugugcccgccacuaaccccacugaagcccgucccuucaggcugaugcugguggaggaggagcugcgccgggaccaccccgccauggcugagccgcugccagaacccaagaagaggcugcucgacgcucagguggaaauuacaaugucauuuaucuucuccgugucccauccccauccaucccacugucuuucgugcacucacuacaccagccaccuagccccaucaccaucugucucucauagucugcuguuuguccacuggcugcuccuggcagcccccuagugaccccaucuucaucccaucgucugugccuuugucacuccuggcagcgucagcccaacuccugugccuucccauccagucuucccacuccucucugcaucucaggaccuucucuaccagaaccuuggucuuucugccccuagaccccaccuaguuccaagaaccccugccccuucuuugcucacuccuauucaagccacguuguucagcuuccucugcgcucuugggccagagggcuagaagcugcuguuuucuggaauagagcacagggcaguaugaucuguaguuucuccaggcccuggccgguacccugaaaacuuggggacccaucaccucuguucucuuggcucccuaauuuuccugucuccuuggcagcuccugcauagcuuccucuuccugacucuucagaucuugaaggccuuccauccuguaaccucccuuugcccucaguauuuaaguccagccucccucuggccucccucccacucuggcccucagaccuucccagcugccugcugcccagccucucuucucacaagccagcuucuaggaccucccuucugcacccuuaccccuugcuuucccaaaauucugcucauuuuccuacccauacuccucuuugcucugacugcuaggcuccccccgccugccauccccccaccaaggcuccugaccccaugaccccacucucucccacugcagcuccucaucagguaauucuccugguuccgcuuuggccacgggcggaggacacagggggaggugacuccggaccacugcagguuggucgugaagcccacucccuccaacaccuccggagccucuccccucucacugcugcccuccacacccagagaaccuccacagacuccagcccuccgacaccugcacagauccaucucccaagacaccacccaaagagagcauuugcugcugcuucccagaacuguccaacaauaccuuagcaacaccaagaguugggcccuagaugggcccagcacauucacaggucacacccacuucccugcaaaacccacccccucccagccuccuccugacucuaagcccuccucuuccucuaccucuccaguguaugucugucaccccccauuucaccagagcguccuuaggggcuggggguggguuuguuaaugggguggaggcaaugauggguuggaggaucuuggcuauaggggcugugcugacugcagcagguagguuggguuucccucuuccuucccuaaucuugguucucuacccuccuuuccacuccucaccugauucucucucuuccuccuccuuauaucugugaggcagaaggcaucugaagcucauauuagcccccauugggugggaauuaggaguggguaguuaacucagggagacuugagauacccuggaaaaaaugcuauugagauguccugacauuaggcaggguggauggaacaagaaggagcaagaaaggaaccucaggcagauguuaggacauggacuugaucauguggccugggaguuuagaaauggggagagacauccuccuagaucagaucgugggcucaguaggcauguugauucccagggagaggugccaggaacagcaugguaaagaauguacucuucacagcucacauccccagguugcugaugccacucacucccccucuccugccaucgaguggccuugccggacacaucacccuaccuaaaaagccaguaaaugagaaccugucagcuauagccaucauuucugagaugcgauuuucuuugggauugagcugcagugggcaguggcuccuuacacuguaauuuuaauucucugccugcccagccucucugucaaaguagcuggugaucuauaaagaugcuaaaaggcaccaggggacuuugccauuuaaaggacuccugcagugaauucuuuuguaaaaugaauaauggcacccuaauuuauccacuuucuaaauuuggguccauggggguguccagggcaugcuuaugugcugucaccagcagacaaacagagggaauggaaucuggggguuccuucccugcucucccgccauacucaggauacccuaccauaagugauuuccucucacugacuugcagaaaaugugugagauacccagcaagcuaagaaggcaguuuugcuggguaucucauacccaaggcugggguuugggugaucugagagguuagcuccuugauccuaggauggaagggagagcuuauauagaagcuuuuacuuggaagguuuuguauccuaaggucagacauagcuauauuaccaagccuaaaugccauguggcccaggaaauaauuuggacauuuguucuaaaccacuugugguagguauuggucucucugcaacucagccauuaauuagaaauuaguuuugagccugaauuuuaaaaagccaaguguugcccccagcccacacacacacacacggacauguacaguacaaaccccagauaauuacaacagccaaagagagaaggaagugaauuucccaaccagaagcguagggaaauucagauggcuuucuuuucucccagcagaggaacagaaggcggagcuaagggcaggaaccaggaguuggucaaggagcuauaggaggugaugagaguagaaccagggguaggagcuggucugguaccccucacccucuaauugggagcccagggagaaggacugaaaagaagaugggaguggaaaagaauaaagccaguuucugcuucccagggaugcagagauuggggcaugcugugucugcagaagcuccuagucauuuccgccauaauugugagagagaggggcagcccucccacaagauuuuucccuucccauaucacuucccugaauccccuuccuuuccccccaguacaguuaaaccucucucuaauuuggaauguuauauuugagaagauggccacugugaauaagugacaaacggaaugacagugucuauuuaaugaaaugcaugucuucaaaauauauacagaacucgaugaacaaggcuuuuuccacuccucagggagcaugcauuaaugaauagauaggauucaaaagucuguuuucugguauggguuaaauauccccuccuacagacauauuuccaccacuaauuugcuuaguacaccuuuucuucacagauaaaggaaaaugcaagcucaguuuuucuucagauuaugaagaaauuccaaauccacagggguuuggauuaaugagguuuugcuguacugccuccccuuauuccucaacaugaaguucccaccucggauuggggaugggugggaggggguuucaagaggaggagggugggaugggcaaggaauauacacaggugaagccagagaaggguuagguugggggugcggugggaacuugcuguuuugaucugguuuccuggugugacacucuggguuaaaggcuugaaggccccuguuaggagucuaggggugagauucucuucucucugaucccagaggacguuaacuucuacugcaggugagaaacaaaauaggaggaugguggggacuguccugggaggagggggugguccauggcuuguggugugggcuggcuauaggggaggccacugcuaggggacuggcauccaggcccccuugaagcgucucaauaaguccgcgcucuccuuuuuggugucuugcaggagaggcagcuuccccccuuggguccaacaaacccgcgugugacgcuggccccaccguggaauggccuggcccccccagccccaccacccccaccccggcugcagauuacggagaacggcgaguuccgaaacaccgcagaccacuagcccacccagcaucagagaccuucucuuccuuuccugugcaccccacccuguaacagcaccaaccaccaggauuggacaucaccgaggaacagcgggauugccuccccgaaugccucccugggaggcacacugauugcccacccccaccacugcaccauuuccaggagggagaguggggacccucagccgcccccuuuuccuucccauuggggugcugcccucucuuugacccccagggacccuugccccaggacaccgccuaccccguacagaccccuucacuccggggugcuauccccauccucugccucaucguuccccugagcacugggggacagacccucacccccacccuggggguguggcaccuccaaacuuucaacuucagggugauuuuuuuagcaguaaccagagcugacaaucuaacuccccuccaccgccccauuuuggccuccccugccccccuuguuauggggaggggaccccgggugagggggcccuauuaccccuugauuucucaggagcgucugggggggcucagcacgcacaaacuccuucuccuucuaccacucuuaaauuuacucccuccccacccagaacccagaugggguggagggggccaccggggcagggagggggcggcaaggggggaaugggaguugucuccccuucuccccacaccugaucugcucucggcuggucccagagcggggugagggggcuuaugccccccccucccccaguguguugggugggguggaauugagguuagggugaggggucaggguuuaggaggguguguauguugggaggacaggcuaguugaucuguccuacucugacacacaguccccucugccccuuccuucucucuucuuggucucuacucccagggggaggggggaacuuacucuaggaaaagccaugucucucucccccaggguggggggaccuguguuggaggagggguguuggggggcccccuuccaugacucuguccccugggggagguaggacagggcugggcuucccucucauccucccccucccaaucuccuuccaccucccucccucccgccagcuccacgauuuuucgguguuucucuguacauaguuuucuggcgggauaggggagguaggauggaugggguuugggguggguaggccaugggaggggagaagccccuccuuggcacccccucuucccugacugcuguccccuacccagccuugcccccuucauccuuuugcguuugguauugagacucuccuagacucuacuccucuuucuuuuguauggacaguuccccuucagucccaucccccuacacauacacccagccggggccaaauuuauacuuauauaaaaguuguaaauaugugaaauuuuaucccugugcccuuuccccaccucaggcccuaccccuggacccuccccaaccuuccuucucucuucuuuggcuguuguaauuaucugggguuuguacuguacauauccggggugugugugugugggcugggggcaacccuucuguacagagcuuccuggcccccuccccccccgccccucugcuucccuccccacccaccaccucaaggguagggaguugcucuuccuaccuguuuuauuuuguuuucucguucucccuccccaccccacucccagccuuaucuauccccccucacuguccccuuuucuccacucccagccccauuuccuuuuuuucuggaguguguggugaaacagaaaaaaacauguuuaauaaacggagauuguucuuuua

SEQ ID NO: 10 - RNA, 18 nt, Artificial Sequence
  Description of Artificial Sequence: Synthetic oligonucleotide
aaagggcauucacaacca

SEQ ID NO: 11 - RNA, 18 nt, Artificial Sequence
  Description of Artificial Sequence: Synthetic oligonucleotide
uccuaaaagggcauucac

SEQ ID NO: 12 - RNA, 18 nt, Artificial Sequence
  Description of Artificial Sequence: Synthetic oligonucleotide
auugcuccuaaaagggca

SEQ ID NO: 13 - RNA, 18 nt, Artificial Sequence
  Description of Artificial Sequence: Synthetic oligonucleotide
auggaauugcuccuaaaa

SEQ ID NO: 14 - RNA, 18 nt, Artificial Sequence
  Description of Artificial Sequence: Synthetic oligonucleotide
gauggauggaauugcucc

SEQ ID NO: 15 - RNA, 18 nt, Artificial Sequence
  Description of Artificial Sequence: Synthetic oligonucleotide
uucaugauggauggaauu

SEQ ID NO: 16 - RNA, 18 nt, Artificial Sequence
  Description of Artificial Sequence: Synthetic oligonucleotide
gcacauucaugauggaug

SEQ ID NO: 17 - RNA, 18 nt, Artificial Sequence
  Description of Artificial Sequence: Synthetic oligonucleotide
cagaagcacauucaugau

SEQ ID NO: 18 - RNA, 18 nt, Artificial Sequence
  Description of Artificial Sequence: Synthetic oligonucleotide
caaaccagaagcacauuc

SEQ ID NO: 19 - RNA, 18 nt, Artificial Sequence
  Description of Artificial Sequence: Synthetic oligonucleotide
uaagacaaaccagaagca

SEQ ID NO: 20 - RNA, 18 nt, Artificial Sequence
  Description of Artificial Sequence: Synthetic oligonucleotide
gaauauaagacaaaccag

SEQ ID NO: 21 - RNA, 18 nt, Artificial Sequence
  Description of Artificial Sequence: Synthetic oligonucleotide
agccagaauauaagacaa

SEQ ID NO: 22 - RNA, 18 nt, Artificial Sequence
  Description of Artificial Sequence: Synthetic oligonucleotide
aaauuagccagaauauaa

SEQ ID NO: 23 - RNA, 18 nt, Artificial Sequence
  Description of Artificial Sequence: Synthetic oligonucleotide
gcugaaaauuagccagaa

SEQ ID NO: 24 - RNA, 18 nt, Artificial Sequence
  Description of Artificial Sequence: Synthetic oligonucleotide
augaugcugaaaauuagc

SEQ ID NO: 25 - RNA, 18 nt, Artificial Sequence
  Description of Artificial Sequence: Synthetic oligonucleotide
cgcccaugaugcugaaaa

SEQ ID NO: 26 - RNA, 18 nt, Artificial Sequence
  Description of Artificial Sequence: Synthetic oligonucleotide
auuuacgcccaugaugcu

SEQ ID NO: 27 - RNA, 18 nt, Artificial Sequence
  Description of Artificial Sequence: Synthetic oligonucleotide
aacaaauuuacgcccaug

SEQ ID NO: 28 - RNA, 18 nt, Artificial Sequence
  Description of Artificial Sequence: Synthetic oligonucleotide
cagcaaacaaauuuacgc

SEQ ID NO: 29 - RNA, 18 nt, Artificial Sequence
  Description of Artificial Sequence: Synthetic oligonucleotide
uuugccagcaaacaaauu

SEQ ID NO: 30 - RNA, 18 nt, Artificial Sequence
  Description of Artificial Sequence: Synthetic oligonucleotide
uagaauuugccagcaaac

SEQ ID NO: 31 - RNA, 18 nt, Artificial Sequence
  Description of Artificial Sequence: Synthetic oligonucleotide
agugguagaauuugccag

SEQ ID NO: 32 - RNA, 18 nt, Artificial Sequence
  Description of Artificial Sequence: Synthetic oligonucleotide
aauacagugguagaauuu

SEQ ID NO: 33 - RNA, 18 nt, Artificial Sequence
  Description of Artificial Sequence: Synthetic oligonucleotide
guguuaauacagugguag

SEQ ID NO: 34 - RNA, 18 nt, Artificial Sequence
  Description of Artificial Sequence: Synthetic oligonucleotide
uugugguguuaauacagu

SEQ ID NO: 35 - RNA, 18 nt, Artificial Sequence
  Description of Artificial Sequence: Synthetic oligonucleotide
accaguugugguguuaau

SEQ ID NO: 36 - RNA, 18 nt, Artificial Sequence
  Description of Artificial Sequence: Synthetic oligonucleotide
cugucaccaguuguggug

SEQ ID NO: 37 - RNA, 18 nt, Artificial Sequence
  Description of Artificial Sequence: Synthetic oligonucleotide
caaaccugucaccaguug

SEQ ID NO: 38 - RNA, 18 nt, Artificial Sequence
  Description of Artificial Sequence: Synthetic oligonucleotide
gaugucaaaccugucacc

SEQ ID NO: 39 - RNA, 18 nt, Artificial Sequence
  Description of Artificial Sequence: Synthetic oligonucleotide
ucuucgaugucaaaccug

SEQ ID NO: 40 - RNA, 18 nt, Artificial Sequence
  Description of Artificial Sequence: Synthetic oligonucleotide
ucacgucuucgaugucaa

SEQ ID NO: 41 - RNA, 18 nt, Artificial Sequence
  Description of Artificial Sequence: Synthetic oligonucleotide
auuauucacgucuucgau

SEQ ID NO: 42 - RNA, 18 nt, Artificial Sequence
  Description of Artificial Sequence: Synthetic oligonucleotide
guaugauuauucacgucu

SEQ ID NO: 43 - RNA, 18 nt, Artificial Sequence
  Description of Artificial Sequence: Synthetic oligonucleotide
aaucaguaugauuauuca

SEQ ID NO: 44 - RNA, 18 nt, Artificial Sequence
  Description of Artificial Sequence: Synthetic oligonucleotide
uaggcaaucaguaugauu

SEQ ID NO: 45 - RNA, 18 nt, Artificial Sequence
  Description of Artificial Sequence: Synthetic oligonucleotide
aguuuuaggcaaucagua

SEQ ID NO: 46 - RNA, 18 nt, Artificial Sequence
  Description of Artificial Sequence: Synthetic oligonucleotide
cuauuaguuuuaggcaau

SEQ ID NO: 47 - RNA, 18 nt, Artificial Sequence
  Description of Artificial Sequence: Synthetic oligonucleotide
ucuuucuauuaguuuuag

SEQ ID NO: 48 - RNA, 18 nt, Artificial Sequence
  Description of Artificial Sequence: Synthetic oligonucleotide
ucauuucuuucuauuagu

SEQ ID NO: 49 - RNA, 18 nt, Artificial Sequence
  Description of Artificial Sequence: Synthetic oligonucleotide
cagucucauuucuuucua

SEQ ID NO: 50 - RNA, 18 nt, Artificial Sequence
  Description of Artificial Sequence: Synthetic oligonucleotide
ucgagcagucucauuucu

SEQ ID NO: 51 - RNA, 18 nt, Artificial Sequence
  Description of Artificial Sequence: Synthetic oligonucleotide
uuccaucgagcagucuca

SEQ ID NO: 52 - RNA, 18 nt, Artificial Sequence
  Description of Artificial Sequence: Synthetic oligonucleotide
cauuuuuccaucgagcag

SEQ ID NO: 53 - RNA, 18 nt, Artificial Sequence
  Description of Artificial Sequence: Synthetic oligonucleotide
uuucacauuuuuccaucg

SEQ ID NO: 54 - RNA, 18 nt, Artificial Sequence
  Description of Artificial Sequence: Synthetic oligonucleotide
uuuacuuucacauuuuuc

SEQ ID NO: 55 - RNA, 18 nt, Artificial Sequence
  Description of Artificial Sequence: Synthetic oligonucleotide
caaaguuuacuuucacau

SEQ ID NO: 56 - RNA, 18 nt, Artificial Sequence
  Description of Artificial Sequence: Synthetic oligonucleotide
auuaucaaaguuuacuuu

SEQ ID NO: 57 - RNA, 18 nt, Artificial Sequence
  Description of Artificial Sequence: Synthetic oligonucleotide
ccuacauuaucaaaguuu

SEQ ID NO: 58 - RNA, 18 nt, Artificial Sequence
  Description of Artificial Sequence: Synthetic oligonucleotide
caaauccuacauuaucaa

SEQ ID NO: 59 - RNA, 18 nt, Artificial Sequence
  Description of Artificial Sequence: Synthetic oligonucleotide
auacccaaauccuacauu

SEQ ID NO: 60 - RNA, 18 nt, Artificial Sequence
  Description of Artificial Sequence: Synthetic oligonucleotide
gagagauacccaaauccu

SEQ ID NO: 61 - RNA, 18 nt, Artificial Sequence
  Description of Artificial Sequence: Synthetic oligonucleotide
gcaaagagagauacccaa

SEQ ID NO: 62 - RNA, 18 nt, Artificial Sequence
  Description of Artificial Sequence: Synthetic oligonucleotide
uugaagcaaagagagaua

SEQ ID NO: 63 - RNA, 18 nt, Artificial Sequence
  Description of Artificial Sequence: Synthetic oligonucleotide
cagagaaaauaguguuca

SEQ ID NO: 64 - RNA, 18 nt, Artificial Sequence
  Description of Artificial Sequence: Synthetic oligonucleotide
auauucagagaaaauagu

SEQ ID NO: 65 - RNA, 18 nt, Artificial Sequence
  Description of Artificial Sequence: Synthetic oligonucleotide
uaaaaauauucagagaaa

SEQ ID NO: 66 - RNA, 18 nt, Artificial Sequence
  Description of Artificial Sequence: Synthetic oligonucleotide
aacaauaaaaauauucag

SEQ ID NO: 67 - RNA, 18 nt, Artificial Sequence
  Description of Artificial Sequence: Synthetic oligonucleotide
uuccaaacaauaaaaaua

SEQ ID NO: 68 - RNA, 18 nt, Artificial Sequence
  Description of Artificial Sequence: Synthetic oligonucleotide
uauuauuccaaacaauaa

SEQ ID NO: 69 - RNA, 18 nt, Artificial Sequence
  Description of Artificial Sequence: Synthetic oligonucleotide
uuuguuauuauuccaaac

SEQ ID NO: 70 - RNA, 18 nt, Artificial Sequence
  Description of Artificial Sequence: Synthetic oligonucleotide
auuauuuuguuauuauuc

SEQ ID NO: 71 - RNA, 18 nt, Artificial Sequence
  Description of Artificial Sequence: Synthetic oligonucleotide
augucauuauuuuguuau

SEQ ID NO: 72 - RNA, 18 nt, Artificial Sequence
  Description of Artificial Sequence: Synthetic oligonucleotide
gauguaugucauuauuuu

SEQ ID NO: 73 - RNA, 18 nt, Artificial Sequence
  Description of Artificial Sequence: Synthetic oligonucleotide
uaauagauguaugucauu

SEQ ID NO: 74 - RNA, 18 nt, Artificial Sequence
  Description of Artificial Sequence: Synthetic oligonucleotide
cuaaauaauagauguaug

SEQ ID NO: 75 - RNA, 18 nt, Artificial Sequence
  Description of Artificial Sequence: Synthetic oligonucleotide
aggaacuaaauaauagau

SEQ ID NO: 76 - RNA, 18 nt, Artificial Sequence
  Description of Artificial Sequence: Synthetic oligonucleotide
uucuuaggaacuaaauaa

SEQ ID NO: 77 - RNA, 18 nt, Artificial Sequence
  Description of Artificial Sequence: Synthetic oligonucleotide
acuuuuucuuaggaacua

SEQ ID NO: 78 - RNA, 18 nt, Artificial Sequence
  Description of Artificial Sequence: Synthetic oligonucleotide
uauauacuuuuucuuagg

SEQ ID NO: 79 - RNA, 18 nt, Artificial Sequence
  Description of Artificial Sequence: Synthetic oligonucleotide
agaaauauauacuuuuuc

SEQ ID NO: 80 - RNA, 18 nt, Artificial Sequence
  Description of Artificial Sequence: Synthetic oligonucleotide
uagaaagaaauauauacu

SEQ ID NO: 81 - RNA, 18 nt, Artificial Sequence
  Description of Artificial Sequence: Synthetic oligonucleotide
uuaaauagaaagaaauau

SEQ ID NO: 82 - RNA, 18 nt, Artificial Sequence
  Description of Artificial Sequence: Synthetic oligonucleotide
auuuuuuaaauagaaaga

SEQ ID NO: 83 - RNA, 18 nt, Artificial Sequence
  Description of Artificial Sequence: Synthetic oligonucleotide
uugaaauuuuuuaaauag

SEQ ID NO: 84 - RNA, 18 nt, Artificial Sequence
  Description of Artificial Sequence: Synthetic oligonucleotide
acaaauugaaauuuuuua

SEQ ID NO: 85 - RNA, 18 nt, Artificial Sequence
  Description of Artificial Sequence: Synthetic oligonucleotide
uacuaacaaauugaaauu

SEQ ID NO: 86 - RNA, 18 nt, Artificial Sequence
  Description of Artificial Sequence: Synthetic oligonucleotide
acuuguacuaacaaauug

SEQ ID NO: 87 - RNA, 18 nt, Artificial Sequence
  Description of Artificial Sequence: Synthetic oligonucleotide
cauaaacuuguacuaaca

SEQ ID NO: 88 - RNA, 18 nt, Artificial Sequence
  Description of Artificial Sequence: Synthetic oligonucleotide
gggcucauaaacuuguac

SEQ ID NO: 89 - RNA, 18 nt, Artificial Sequence
  Description of Artificial Sequence: Synthetic oligonucleotide
caucugggcucauaaacu

SEQ ID NO: 90 - RNA, 18 nt, Artificial Sequence
  Description of Artificial Sequence: Synthetic oligonucleotide
ucacccaucugggcucau

SEQ ID NO: 91 - RNA, 18 nt, Artificial Sequence
  Description of Artificial Sequence: Synthetic oligonucleotide
aguuuucacccaucuggg

SEQ ID NO: 92 - RNA, 18 nt, Artificial Sequence
  Description of Artificial Sequence: Synthetic oligonucleotide
aauaaaguuuucacccau

SEQ ID NO: 93 - RNA, 18 nt, Artificial Sequence
  Description of Artificial Sequence: Synthetic oligonucleotide
cauguaauaaaguuuuca

SEQ ID NO: 94 - RNA, 18 nt, Artificial Sequence
  Description of Artificial Sequence: Synthetic oligonucleotide
ccuuacauguaauaaagu

SEQ ID NO: 95 - RNA, 18 nt, Artificial Sequence
  Description of Artificial Sequence: Synthetic oligonucleotide
gcaguccuuacauguaau

SEQ ID NO: 96 - RNA, 18 nt, Artificial Sequence
  Description of Artificial Sequence: Synthetic oligonucleotide
uaucugcaguccuuacau

SEQ ID NO: 97 - RNA, 18 nt, Artificial Sequence
  Description of Artificial Sequence: Synthetic oligonucleotide
gacuauaucugcaguccu

SEQ ID NO: 98 - RNA, 18 nt, Artificial Sequence
  Description of Artificial Sequence: Synthetic oligonucleotide
cuacugacuauaucugca

SEQ ID NO: 99 - RNA, 18 nt, Artificial Sequence
  Description of Artificial Sequence: Synthetic oligonucleotide
ggucacuacugacuauau

SEQ ID NO: 100 - RNA, 18 nt, Artificial Sequence
  Description of Artificial Sequence: Synthetic oligonucleotide
ggucuggucacuacugac

SEQ ID NO: 101 - RNA, 18 nt, Artificial Sequence
  Description of Artificial Sequence: Synthetic oligonucleotide
uguuuggucuggucacua

SEQ ID NO: 102 - RNA, 18 nt, Artificial Sequence
  Description of Artificial Sequence: Synthetic oligonucleotide
gucuuuguuuggucuggu

SEQ ID NO: 103 - RNA, 18 nt, Artificial Sequence
  Description of Artificial Sequence: Synthetic oligonucleotide
aagaggucuuuguuuggu

SEQ ID NO: 104 - RNA, 18 nt, Artificial Sequence
  Description of Artificial Sequence: Synthetic oligonucleotide
agacaaagaggucuuugu

SEQ ID NO: 105 - RNA, 18 nt, Artificial Sequence
  Description of Artificial Sequence: Synthetic oligonucleotide
aaaaaagacaaagagguc

SEQ ID NO: 106 - RNA, 18 nt, Artificial Sequence
  Description of Artificial Sequence: Synthetic oligonucleotide
acaagaaaaaagacaaag

SEQ ID NO: 107 - RNA, 18 nt, Artificial Sequence
  Description of Artificial Sequence: Synthetic oligonucleotide
aaaauacaagaaaaaaga

SEQ ID NO: 108 - RNA, 18 nt, Artificial Sequence
  Description of Artificial Sequence: Synthetic oligonucleotide
caaagaaaauacaagaaa

SEQ ID NO: 109 - RNA, 18 nt, Artificial Sequence
  Description of Artificial Sequence: Synthetic oligonucleotide
agaaacaaagaaaauaca

SEQ ID NO: 110 - RNA, 18 nt, Artificial Sequence
  Description of Artificial Sequence: Synthetic oligonucleotide
aauauagaaacaaagaaa

SEQ ID NO: 111 - RNA, 18 nt, Artificial Sequence
  Description of Artificial Sequence: Synthetic oligonucleotide
agagcaauauagaaacaa

SEQ ID NO: 112 - RNA, 18 nt, Artificial Sequence
  Description of Artificial Sequence: Synthetic oligonucleotide
uagaaagagcaauauaga

SEQ ID NO: 113 - RNA, 18 nt, Artificial Sequence
  Description of Artificial Sequence: Synthetic oligonucleotide
uuauauagaaagagcaau

SEQ ID NO: 114 - RNA, 18 nt, Artificial Sequence
  Description of Artificial Sequence: Synthetic oligonucleotide
cuuguuuauauagaaaga

SEQ ID NO: 115 - RNA, 18 nt, Artificial Sequence
  Description of Artificial Sequence: Synthetic oligonucleotide
auuuacuuguuuauauag

SEQ ID NO: 116 - RNA, 18 nt, Artificial Sequence
  Description of Artificial Sequence: Synthetic oligonucleotide
uauuaauuuacuuguuua

SEQ ID NO: 117 - RNA, 18 nt, Artificial Sequence
  Description of Artificial Sequence: Synthetic oligonucleotide
ugauuuauuaauuuacuu

SEQ ID NO: 118 - RNA, 18 nt, Artificial Sequence
  Description of Artificial Sequence: Synthetic oligonucleotide
guuacugauuuauuaauu

SEQ ID NO: 119 - RNA, 18 nt, Artificial Sequence
  Description of Artificial Sequence: Synthetic oligonucleotide
gcaaaguuacugauuuau

SEQ ID NO: 120 - RNA, 18 nt, Artificial Sequence
  Description of Artificial Sequence: Synthetic oligonucleotide
aaauggcaaaguuacuga

SEQ ID NO: 121 - RNA, 18 nt, Artificial Sequence
  Description of Artificial Sequence: Synthetic oligonucleotide
auaaaaaauggcaaaguu

SEQ ID NO: 122 - RNA, 18 nt, Artificial Sequence
  Description of Artificial Sequence: Synthetic oligonucleotide
ucacaauaaaaaauggca

SEQ ID NO: 123 - RNA, 18 nt, Artificial Sequence
  Description of Artificial Sequence: Synthetic oligonucleotide
ucuaaucacaauaaaaaa

SEQ ID NO: 124 - RNA, 18 nt, Artificial Sequence
  Description of Artificial Sequence: Synthetic oligonucleotide
agccuucuaaucacaaua

SEQ ID NO: 125 - RNA, 18 nt, Artificial Sequence
  Description of Artificial Sequence: Synthetic oligonucleotide
aaacaagccuucuaauca

SEQ ID NO: 126 - RNA, 18 nt, Artificial Sequence
  Description of Artificial Sequence: Synthetic oligonucleotide
cagggaaacaagccuucu

SEQ ID NO: 127 - RNA, 18 nt, Artificial Sequence
  Description of Artificial Sequence: Synthetic oligonucleotide
cugaucagggaaacaagc

SEQ ID NO: 128 - RNA, 18 nt, Artificial Sequence
  Description of Artificial Sequence: Synthetic oligonucleotide
gguagcugaucagggaaa

SEQ ID NO: 129 - RNA, 18 nt, Artificial Sequence
  Description of Artificial Sequence: Synthetic oligonucleotide
guuuugguagcugaucag

SEQ ID NO: 130 - RNA, 18 nt, Artificial Sequence
  Description of Artificial Sequence: Synthetic oligonucleotide
auuccguuuugguagcug

SEQ ID NO: 131 - RNA, 18 nt, Artificial Sequence
  Description of Artificial Sequence: Synthetic oligonucleotide
aguguauuccguuuuggu

SEQ ID NO: 132 - RNA, 18 nt, Artificial Sequence
  Description of Artificial Sequence: Synthetic oligonucleotide
uguuaaguguauuccguu

SEQ ID NO: 133 - RNA, 18 nt, Artificial Sequence
  Description of Artificial Sequence: Synthetic oligonucleotide
cuaucuguuaaguguauu

SEQ ID NO: 134 - RNA, 18 nt, Artificial Sequence
  Description of Artificial Sequence: Synthetic oligonucleotide
augaucuaucuguuaagu

SEQ ID NO: 135 - RNA, 18 nt, Artificial Sequence
  Description of Artificial Sequence: Synthetic oligonucleotide
ggaagaugaucuaucugu

SEQ ID NO: 136 - RNA, 18 nt, Artificial Sequence
  Description of Artificial Sequence: Synthetic oligonucleotide
guuuuggaagaugaucua

SEQ ID NO: 137 - RNA, 18 nt, Artificial Sequence
  Description of Artificial Sequence: Synthetic oligonucleotide
uauguguuuuggaagaug

SEQ ID NO: 138 - RNA, 18 nt, Artificial Sequence
  Description of Artificial Sequence: Synthetic oligonucleotide
aaguguauguguuuugga

SEQ ID NO: 139 - RNA, 18 nt, Artificial Sequence
  Description of Artificial Sequence: Synthetic oligonucleotide
guauuaaguguauguguu

SEQ ID NO: 140 - RNA, 18 nt, Artificial Sequence
  Description of Artificial Sequence: Synthetic oligonucleotide
uagguguauuaaguguau

SEQ ID NO: 141 - RNA, 18 nt, Artificial Sequence
  Description of Artificial Sequence: Synthetic oligonucleotide
ccaauuagguguauuaag

SEQ ID NO: 142 - RNA, 18 nt, Artificial Sequence
  Description of Artificial Sequence: Synthetic oligonucleotide
acaauccaauuaggugua

SEQ ID NO: 143 - RNA, 18 nt, Artificial Sequence
  Description of Artificial Sequence: Synthetic oligonucleotide
uaauuacaauccaauuag

SEQ ID NO: 144 - RNA, 18 nt, Artificial Sequence
  Description of Artificial Sequence: Synthetic oligonucleotide
ccaauuaauuacaaucca

SEQ ID NO: 145 - RNA, 18 nt, Artificial Sequence
  Description of Artificial Sequence: Synthetic oligonucleotide
cccuaccaauuaauuaca

SEQ ID NO: 146 - RNA, 18 nt, Artificial Sequence
  Description of Artificial Sequence: Synthetic oligonucleotide
uuaaucccuaccaauuaa

SEQ ID NO: 147 - RNA, 18 nt, Artificial Sequence
  Description of Artificial Sequence: Synthetic oligonucleotide
agcaguuaaucccuacca

SEQ ID NO: 148 - RNA, 18 nt, Artificial Sequence
  Description of Artificial Sequence: Synthetic oligonucleotide
ucagcagcaguuaauccc

SEQ ID NO: 149 - RNA, 18 nt, Artificial Sequence
  Description of Artificial Sequence: Synthetic oligonucleotide
agaacucagcagcaguua

SEQ ID NO: 150 - RNA, 18 nt, Artificial Sequence
  Description of Artificial Sequence: Synthetic oligonucleotide
auaauagaacucagcagc

SEQ ID NO: 151 - RNA, 18 nt, Artificial Sequence
  Description of Artificial Sequence: Synthetic oligonucleotide
uccaaauaauagaacuca

SEQ ID NO: 152 - RNA, 18 nt, Artificial Sequence
  Description of Artificial Sequence: Synthetic oligonucleotide
uuugauccaaauaauaga

SEQ ID NO: 153 - RNA, 18 nt, Artificial Sequence
  Description of Artificial Sequence: Synthetic oligonucleotide
caaacuuugauccaaaua

SEQ ID NO: 154 - RNA, 18 nt, Artificial Sequence
  Description of Artificial Sequence: Synthetic oligonucleotide
uuccccaaacuuugaucc

SEQ ID NO: 155 - RNA, 18 nt, Artificial Sequence
  Description of Artificial Sequence: Synthetic oligonucleotide
ugucauuccccaaacuuu

SEQ ID NO: 156 - RNA, 18 nt, Artificial Sequence
  Description of Artificial Sequence: Synthetic oligonucleotide
cuaaaugucauuccccaa

SEQ ID NO: 157 - RNA, 18 nt, Artificial Sequence
  Description of Artificial Sequence: Synthetic oligonucleotide
aaaaccuaaaugucauuc

SEQ ID NO: 158 - RNA, 18 nt, Artificial Sequence
  Description of Artificial Sequence: Synthetic oligonucleotide
auucuaaaaccuaaaugu

SEQ ID NO: 159 - RNA, 18 nt, Artificial Sequence
  Description of Artificial Sequence: Synthetic oligonucleotide
uucuaauucuaaaaccua

SEQ ID NO: 160 - RNA, 18 nt, Artificial Sequence
  Description of Artificial Sequence: Synthetic oligonucleotide
ccugguucuaauucuaaa

SEQ ID NO: 161 - RNA, 18 nt, Artificial Sequence
  Description of Artificial Sequence: Synthetic oligonucleotide
cuaugccugguucuaauu

SEQ ID NO: 162 - RNA, 18 nt, Artificial Sequence
  Description of Artificial Sequence: Synthetic oligonucleotide
uauccuuuuaagaauuuu

SEQ ID NO: 163 - RNA, 18 nt, Artificial Sequence
  Description of Artificial Sequence: Synthetic oligonucleotide
gcaacuauccuuuuaaga

SEQ ID NO: 164 - RNA, 18 nt, Artificial Sequence
  Description of Artificial Sequence: Synthetic oligonucleotide
ggguugcaacuauccuuu

SEQ ID NO: 165 - RNA, 18 nt, Artificial Sequence
  Description of Artificial Sequence: Synthetic oligonucleotide
aggcaggguugcaacuau

SEQ ID NO: 166 - RNA, 18 nt, Artificial Sequence
  Description of Artificial Sequence: Synthetic oligonucleotide
cauaaaggcaggguugca

SEQ ID NO: 167 - RNA, 18 nt, Artificial Sequence
  Description of Artificial Sequence: Synthetic oligonucleotide
ggauacauaaaggcaggg

SEQ ID NO: 168 - RNA, 18 nt, Artificial Sequence
  Description of Artificial Sequence: Synthetic oligonucleotide
uaccaggauacauaaagg

SEQ ID NO: 169 - RNA, 18 nt, Artificial Sequence
  Description of Artificial Sequence: Synthetic oligonucleotide
gauaguaccaggauacau

SEQ ID NO: 170 - RNA, 18 nt, Artificial Sequence
  Description of Artificial Sequence: Synthetic oligonucleotide
guaaggauaguaccagga

SEQ ID NO: 171 - RNA, 18 nt, Artificial Sequence
  Description of Artificial Sequence: Synthetic oligonucleotide
acaauguaaggauaguac

SEQ ID NO: 172 - RNA, 18 nt, Artificial Sequence
  Description of Artificial Sequence: Synthetic oligonucleotide
uuguaacaauguaaggau

SEQ ID NO: 173 - RNA, 18 nt, Artificial Sequence
  Description of Artificial Sequence: Synthetic oligonucleotide
cuuuauuguaacaaugua

SEQ ID NO: 174 - RNA, 18 nt, Artificial Sequence
  Description of Artificial Sequence: Synthetic oligonucleotide
uuucucuuuauuguaaca

SEQ ID NO: 175 - RNA, 18 nt, Artificial Sequence
  Description of Artificial Sequence: Synthetic oligonucleotide
uaagauuucucuuuauug

SEQ ID NO: 176 - RNA, 18 nt, Artificial Sequence
  Description of Artificial Sequence: Synthetic oligonucleotide
aaauuuaagauuucucuu

SEQ ID NO: 177 - RNA, 18 nt, Artificial Sequence
  Description of Artificial Sequence: Synthetic oligonucleotide
auugaaaauuuaagauuu

SEQ ID NO: 178 - RNA, 18 nt, Artificial Sequence
  Description of Artificial Sequence: Synthetic oligonucleotide
aagugauugaaaauuuaa

SEQ ID NO: 179 - RNA, 18 nt, Artificial Sequence
  Description of Artificial Sequence: Synthetic oligonucleotide
gaucaaagugauugaaaa

SEQ ID NO: 180 - RNA, 18 nt, Artificial Sequence
  Description of Artificial Sequence: Synthetic oligonucleotide
agggugaucaaagugauu

SEQ ID NO: 181 - RNA, 18 nt, Artificial Sequence
  Description of Artificial Sequence: Synthetic oligonucleotide
ucugcagggugaucaaag

SEQ ID NO: 182 - RNA, 18 nt, Artificial Sequence
  Description of Artificial Sequence: Synthetic oligonucleotide
auuuaucugcagggugau

SEQ ID NO: 183 - RNA, 18 nt, Artificial Sequence
  Description of Artificial Sequence: Synthetic oligonucleotide
cuaaaauuuaucugcagg

SEQ ID NO: 184 - RNA, 18 nt, Artificial Sequence
  Description of Artificial Sequence: Synthetic oligonucleotide
aucugcuaaaauuuaucu

SEQ ID NO: 185 - RNA, 18 nt, Artificial Sequence
  Description of Artificial Sequence: Synthetic oligonucleotide
ggaucaucugcuaaaauu

SEQ ID NO: 186 - RNA, 18 nt, Artificial Sequence
  Description of Artificial Sequence: Synthetic oligonucleotide
ucuaaggaucaucugcua

SEQ ID NO: 187 - RNA, 18 nt, Artificial Sequence
  Description of Artificial Sequence: Synthetic oligonucleotide
uuagaucuaaggaucauc

SEQ ID NO: 188 - RNA, 18 nt, Artificial Sequence
  Description of Artificial Sequence: Synthetic oligonucleotide
acaacuuagaucuaagga

SEQ ID NO: 189 - RNA, 18 nt, Artificial Sequence
  Description of Artificial Sequence: Synthetic oligonucleotide
uaauuacaacuuagaucu

SEQ ID NO: 190 - RNA, 18 nt, Artificial Sequence
  Description of Artificial Sequence: Synthetic oligonucleotide
ccaaauaauuacaacuua

SEQ ID NO: 191 - RNA, 18 nt, Artificial Sequence
  Description of Artificial Sequence: Synthetic oligonucleotide
aucagccaaauaauuaca

SEQ ID NO: 192 - RNA, 18 nt, Artificial Sequence
  Description of Artificial Sequence: Synthetic oligonucleotide
gcucuaucagccaaauaa

SEQ ID NO: 193 - RNA, 18 nt, Artificial Sequence
  Description of Artificial Sequence: Synthetic oligonucleotide
caauagcucuaucagcca

SEQ ID NO: 194 - RNA, 18 nt, Artificial Sequence
  Description of Artificial Sequence: Synthetic oligonucleotide
ugggucaauagcucuauc

SEQ ID NO: 195 - RNA, 18 nt, Artificial Sequence
  Description of Artificial Sequence: Synthetic oligonucleotide
acacaugggucaauagcu

SEQ ID NO: 196 - RNA, 18 nt, Artificial Sequence
  Description of Artificial Sequence: Synthetic oligonucleotide
ugccaacacaugggucaa

SEQ ID NO: 197 - RNA, 18 nt, Artificial Sequence
  Description of Artificial Sequence: Synthetic oligonucleotide
acaaaugccaacacaugg

SEQ ID NO: 198 - RNA, 18 nt, Artificial Sequence
  Description of Artificial Sequence: Synthetic oligonucleotide
gucuuacaaaugccaaca

SEQ ID NO: 199 - RNA, 18 nt, Artificial Sequence
  Description of Artificial Sequence: Synthetic oligonucleotide
agaaagucuuacaaaugc

SEQ ID NO: 200 - RNA, 18 nt, Artificial Sequence
  Description of Artificial Sequence: Synthetic oligonucleotide
uuuuuagaaagucuuaca

SEQ ID NO: 201 - RNA, 18 nt, Artificial Sequence
  Description of Artificial Sequence: Synthetic oligonucleotide
agcacuuuuuagaaaguc

SEQ ID NO: 202 - RNA, 18 nt, Artificial Sequence
  Description of Artificial Sequence: Synthetic oligonucleotide
gcuggagcacuuuuuaga

SEQ ID NO: 203 - RNA, 18 nt, Artificial Sequence
  Description of Artificial Sequence: Synthetic oligonucleotide
aauuugcuggagcacuuu

SEQ ID NO: 204 - RNA, 18 nt, Artificial Sequence
  Description of Artificial Sequence: Synthetic oligonucleotide
auuaaaauuugcuggagc

SEQ ID NO: 205 - RNA, 18 nt, Artificial Sequence
  Description of Artificial Sequence: Synthetic oligonucleotide
gcaguauuaaaauuugcu

SEQ ID NO: 206 - RNA, 18 nt, Artificial Sequence
  Description of Artificial Sequence: Synthetic oligonucleotide
uuaaagcaguauuaaaau

SEQ ID NO: 207 - RNA, 18 nt, Artificial Sequence
  Description of Artificial Sequence: Synthetic oligonucleotide
gauauuuaaagcaguauu

SEQ ID NO: 208 - RNA, 18 nt, Artificial Sequence
  Description of Artificial Sequence: Synthetic oligonucleotide
gucaugauauuuaaagca

SEQ ID NO: 209 - RNA, 18 nt, Artificial Sequence
  Description of Artificial Sequence: Synthetic oligonucleotide
auggugucaugauauuua

SEQ ID NO: 210 - RNA, 18 nt, Artificial Sequence
  Description of Artificial Sequence: Synthetic oligonucleotide
aguucauggugucaugau

SEQ ID NO: 211 - RNA, 18 nt, Artificial Sequence
  Description of Artificial Sequence: Synthetic oligonucleotide
uuuagaguucaugguguc

SEQ ID NO: 212 - RNA, 18 nt, Artificial Sequence
  Description of Artificial Sequence: Synthetic oligonucleotide
aauucuuuagaguucaug

SEQ ID NO: 213 - RNA, 18 nt, Artificial Sequence
  Description of Artificial Sequence: Synthetic oligonucleotide
uuuucaauucuuuagagu

SEQ ID NO: 214 - RNA, 18 nt, Artificial Sequence
  Description of Artificial Sequence: Synthetic oligonucleotide
agcacuuuucaauucuuu

SEQ ID NO: 215 - RNA, 18 nt, Artificial Sequence
  Description of Artificial Sequence: Synthetic oligonucleotide
ucacaagcacuuuucaau

SEQ ID NO: 216 - RNA, 18 nt, Artificial Sequence
  Description of Artificial Sequence: Synthetic oligonucleotide
ccaacucacaagcacuuu

SEQ ID NO: 217 - RNA, 18 nt, Artificial Sequence
  Description of Artificial Sequence: Synthetic oligonucleotide
gauaaccaacucacaagc

SEQ ID NO: 218 - RNA, 18 nt, Artificial Sequence
  Description of Artificial Sequence: Synthetic oligonucleotide
cccuugauaaccaacuca

SEQ ID NO: 219 - RNA, 18 nt, Artificial Sequence
  Description of Artificial Sequence: Synthetic oligonucleotide
uccuccccuugauaacca

SEQ ID NO: 220 - RNA, 18 nt, Artificial Sequence
  Description of Artificial Sequence: Synthetic oligonucleotide
auauauccuccccuugau

SEQ ID NO: 221 - RNA, 18 nt, Artificial Sequence
  Description of Artificial Sequence: Synthetic oligonucleotide
auuugauauauccucccc

SEQ ID NO: 222 - RNA, 18 nt, Artificial Sequence
  Description of Artificial Sequence: Synthetic oligonucleotide
uggccauuugauauaucc

SEQ ID NO: 223 - RNA, 18 nt, Artificial Sequence
  Description of Artificial Sequence: Synthetic oligonucleotide
caaaauggccauuugaua

SEQ ID NO: 224 - RNA, 18 nt, Artificial Sequence
  Description of Artificial Sequence: Synthetic oligonucleotide
uugaacaaaauggccauu

SEQ ID NO: 225 - RNA, 18 nt, Artificial Sequence
  Description of Artificial Sequence: Synthetic oligonucleotide
acauauugaacaaaaugg

SEQ ID NO: 226 - RNA, 18 nt, Artificial Sequence
  Description of Artificial Sequence: Synthetic oligonucleotide
agaacacauauugaacaa

SEQ ID NO: 227 - RNA, 18 nt, Artificial Sequence
  Description of Artificial Sequence: Synthetic oligonucleotide
uuucuagaacacauauug

SEQ ID NO: 228 - RNA, 18 nt, Artificial Sequence
  Description of Artificial Sequence: Synthetic oligonucleotide
uuucauuucuagaacaca

SEQ ID NO: 229 - RNA, 18 nt, Artificial Sequence
  Description of Artificial Sequence: Synthetic oligonucleotide
uggcuuuucauuucuaga

SEQ ID NO: 230 - RNA, 18 nt, Artificial Sequence
  Description of Artificial Sequence: Synthetic oligonucleotide
uaguauggcuuuucauuu

SEQ ID NO: 231 - RNA, 18 nt, Artificial Sequence
  Description of Artificial Sequence: Synthetic oligonucleotide
uauuuuaguauggcuuuu

SEQ ID NO: 232 - RNA, 18 nt, Artificial Sequence
  Description of Artificial Sequence: Synthetic oligonucleotide
gacaguauuuuaguaugg

SEQ ID NO: 233 - RNA, 18 nt, Artificial Sequence
  Description of Artificial Sequence: Synthetic oligonucleotide
accaagacaguauuuuag

SEQ ID NO: 234 - RNA, 18 nt, Artificial Sequence
  Description of Artificial Sequence: Synthetic oligonucleotide
uuuggaccaagacaguau

SEQ ID NO: 235 - RNA, 18 nt, Artificial Sequence
  Description of Artificial Sequence: Synthetic oligonucleotide
cagauuuuggaccaagac

SEQ ID NO: 236 - RNA, 18 nt, Artificial Sequence
  Description of Artificial Sequence: Synthetic oligonucleotide
uuacacagauuuuggacc

SEQ ID NO: 237 - RNA, 18 nt, Artificial Sequence
  Description of Artificial Sequence: Synthetic oligonucleotide
aaauuuuacacagauuuu

SEQ ID NO: 238 - RNA, 18 nt, Artificial Sequence
  Description of Artificial Sequence: Synthetic oligonucleotide
aaaacaaauuuuacacag

SEQ ID NO: 239 - RNA, 18 nt, Artificial Sequence
  Description of Artificial Sequence: Synthetic oligonucleotide
auuucaaaacaaauuuua

SEQ ID NO: 240 - RNA, 18 nt, Artificial Sequence
  Description of Artificial Sequence: Synthetic oligonucleotide
aagacauuucaaaacaaa

SEQ ID NO: 241 - RNA, 18 nt, Artificial Sequence
  Description of Artificial Sequence: Synthetic oligonucleotide
uuugaaagacauuucaaa

SEQ ID NO: 242 - RNA, 18 nt, Artificial Sequence
  Description of Artificial Sequence: Synthetic oligonucleotide
auauuuuugaaagacauu

SEQ ID NO: 243 - RNA, 18 nt, Artificial Sequence
  Description of Artificial Sequence: Synthetic oligonucleotide
agggaauauuuuugaaag

SEQ ID NO: 244 - RNA, 18 nt, Artificial Sequence
  Description of Artificial Sequence: Synthetic oligonucleotide
ucaaaagggaauauuuuu

SEQ ID NO: 245 - RNA, 18 nt, Artificial Sequence
  Description of Artificial Sequence: Synthetic oligonucleotide
aauuuucaaaagggaaua

SEQ ID NO: 246 - RNA, 18 nt, Artificial Sequence
  Description of Artificial Sequence: Synthetic oligonucleotide
gauauaauuuucaaaagg

SEQ ID NO: 247 - RNA, 18 nt, Artificial Sequence
  Description of Artificial Sequence: Synthetic oligonucleotide
uuacugauauaauuuuca

SEQ ID NO: 248 - RNA, 18 nt, Artificial Sequence
  Description of Artificial Sequence: Synthetic oligonucleotide
uauucuuacugauauaau

SEQ ID NO: 249 - RNA, 18 nt, Artificial Sequence
  Description of Artificial Sequence: Synthetic oligonucleotide
auaaauauucuuacugau

SEQ ID NO: 250 - RNA, 18 nt, Artificial Sequence
  Description of Artificial Sequence: Synthetic oligonucleotide
guuuaauaaauauucuua

SEQ ID NO: 251 - RNA, 18 nt, Artificial Sequence
  Description of Artificial Sequence: Synthetic oligonucleotide
cugauguuuaauaaauau

SEQ ID NO: 252 - RNA, 18 nt, Artificial Sequence
  Description of Artificial Sequence: Synthetic oligonucleotide
uagaccugauguuuaaua

SEQ ID NO: 253 - RNA, 18 nt, Artificial Sequence
  Description of Artificial Sequence: Synthetic oligonucleotide
uaauuuagaccugauguu

SEQ ID NO: 254 - RNA, 18 nt, Artificial Sequence
  Description of Artificial Sequence: Synthetic oligonucleotide
aaaaauaauuuagaccug

SEQ ID NO: 255 - RNA, 18 nt, Artificial Sequence
  Description of Artificial Sequence: Synthetic oligonucleotide
ggaguaaaaauaauuuag

SEQ ID NO: 256 - RNA, 18 nt, Artificial Sequence
  Description of Artificial Sequence: Synthetic oligonucleotide
acuuuggaguaaaaauaa

SEQ ID NO: 257 - RNA, 18 nt, Artificial Sequence
  Description of Artificial Sequence: Synthetic oligonucleotide
guuuuacuuuggaguaaa

SEQ ID NO: 258 - RNA, 18 nt, Artificial Sequence
  Description of Artificial Sequence: Synthetic oligonucleotide
ugcauguuuuacuuugga

SEQ ID NO: 259 - RNA, 18 nt, Artificial Sequence
  Description of Artificial Sequence: Synthetic oligonucleotide
uccauccuuugaaugugg

SEQ ID NO: 260 - RNA, 18 nt, Artificial Sequence
  Description of Artificial Sequence: Synthetic oligonucleotide
auccauccauccuuugaa

SEQ ID NO: 261 - RNA, 18 nt, Artificial Sequence
  Description of Artificial Sequence: Synthetic oligonucleotide
auuauauccauccauccu

SEQ ID NO: 262 - RNA, 18 nt, Artificial Sequence
  Description of Artificial Sequence: Synthetic oligonucleotide
cauacauuauauccaucc

SEQ ID NO: 263 - RNA, 18 nt, Artificial Sequence
  Description of Artificial Sequence: Synthetic oligonucleotide
ugcugcauacauuauauc

SEQ ID NO: 264 - RNA, 18 nt, Artificial Sequence
  Description of Artificial Sequence: Synthetic oligonucleotide
ucaacugcugcauacauu

SEQ ID NO: 265 - RNA, 18 nt, Artificial Sequence
  Description of Artificial Sequence: Synthetic oligonucleotide
uggaaucaacugcugcau

SEQ ID NO: 266 - RNA, 18 nt, Artificial Sequence
  Description of Artificial Sequence: Synthetic oligonucleotide
auuucuggaaucaacugc

SEQ ID NO: 267 - RNA, 18 nt, Artificial Sequence
  Description of Artificial Sequence: Synthetic oligonucleotide
aaagggcauucacaacca

SEQ ID NO: 268 - RNA, 18 nt, Artificial Sequence
  Description of Artificial Sequence: Synthetic oligonucleotide
uccuaaaagggcauucac

SEQ ID NO: 269 - RNA, 18 nt, Artificial Sequence
  Description of Artificial Sequence: Synthetic oligonucleotide
auugcuccuaaaagggca

SEQ ID NO: 270 - RNA, 18 nt, Artificial Sequence
  Description of Artificial Sequence: Synthetic oligonucleotide
auggaauugcuccuaaaa

SEQ ID NO: 271 - RNA, 18 nt, Artificial Sequence
  Description of Artificial Sequence: Synthetic oligonucleotide
gauggauggaauugcucc

SEQ ID NO: 272 - RNA, 18 nt, Artificial Sequence
  Description of Artificial Sequence: Synthetic oligonucleotide
uucaugauggauggaauu

SEQ ID NO: 273 - RNA, 18 nt, Artificial Sequence
  Description of Artificial Sequence: Synthetic oligonucleotide
gcacauucaugauggaug

SEQ ID NO: 274 - RNA, 18 nt, Artificial Sequence
  Description of Artificial Sequence: Synthetic oligonucleotide
cagaagcacauucaugau

SEQ ID NO: 275 - RNA, 18 nt, Artificial Sequence
  Description of Artificial Sequence: Synthetic oligonucleotide
caaaccagaagcacauuc

SEQ ID NO: 276 - RNA, 18 nt, Artificial Sequence
  Description of Artificial Sequence: Synthetic oligonucleotide
uaagacaaaccagaagca

SEQ ID NO: 277 - RNA, 18 nt, Artificial Sequence
  Description of Artificial Sequence: Synthetic oligonucleotide
gaauauaagacaaaccag

SEQ ID NO: 278 - RNA, 18 nt, Artificial Sequence
  Description of Artificial Sequence: Synthetic oligonucleotide
agccagaauauaagacaa

SEQ ID NO: 279 - RNA, 18 nt, Artificial Sequence
  Description of Artificial Sequence: Synthetic oligonucleotide
aaauuagccagaauauaa

SEQ ID NO: 280 - RNA, 18 nt, Artificial Sequence
  Description of Artificial Sequence: Synthetic oligonucleotide
gcugaaaauuagccagaa

SEQ ID NO: 281 - RNA, 18 nt, Artificial Sequence
  Description of Artificial Sequence: Synthetic oligonucleotide
augaugcugaaaauuagc

SEQ ID NO: 282 - RNA, 18 nt, Artificial Sequence
  Description of Artificial Sequence: Synthetic oligonucleotide
cgcccaugaugcugaaaa

SEQ ID NO: 283 - RNA, 18 nt, Artificial Sequence
  Description of Artificial Sequence: Synthetic oligonucleotide
auuuacgcccaugaugcu

SEQ ID NO: 284 - RNA, 18 nt, Artificial Sequence
  Description of Artificial Sequence: Synthetic oligonucleotide
aacaaauuuacgcccaug

SEQ ID NO: 285 - RNA, 18 nt, Artificial Sequence
  Description of Artificial Sequence: Synthetic oligonucleotide
cagcaaacaaauuuacgc

SEQ ID NO: 286 - RNA, 18 nt, Artificial Sequence
  Description of Artificial Sequence: Synthetic oligonucleotide
uuugccagcaaacaaauu

SEQ ID NO: 287 - RNA, 18 nt, Artificial Sequence
  Description of Artificial Sequence: Synthetic oligonucleotide
uagaauuugccagcaaac

SEQ ID NO: 288 - RNA, 18 nt, Artificial Sequence
  Description of Artificial Sequence: Synthetic oligonucleotide
agugguagaauuugccag

SEQ ID NO: 289 - RNA, 18 nt, Artificial Sequence
  Description of Artificial Sequence: Synthetic oligonucleotide
aauacagugguagaauuu

SEQ ID NO: 290 - RNA, 18 nt, Artificial Sequence
  Description of Artificial Sequence: Synthetic oligonucleotide
guguuaauacagugguag

SEQ ID NO: 291 - RNA, 18 nt, Artificial Sequence
  Description of Artificial Sequence: Synthetic oligonucleotide
uugugguguuaauacagu

SEQ ID NO: 292 - RNA, 18 nt, Artificial Sequence
  Description of Artificial Sequence: Synthetic oligonucleotide
accaguugugguguuaau

SEQ ID NO: 293 - RNA, 18 nt, Artificial Sequence
  Description of Artificial Sequence: Synthetic oligonucleotide
cugucaccaguuguggug

SEQ ID NO: 294 - RNA, 18 nt, Artificial Sequence
  Description of Artificial Sequence: Synthetic oligonucleotide
caaaccugucaccaguug

SEQ ID NO: 295 - RNA, 18 nt, Artificial Sequence
  Description of Artificial Sequence: Synthetic oligonucleotide
gaugucaaaccugucacc

SEQ ID NO: 296 - RNA, 18 nt, Artificial Sequence
  Description of Artificial Sequence: Synthetic oligonucleotide
ucuucgaugucaaaccug

SEQ ID NO: 297 - RNA, 18 nt, Artificial Sequence
  Description of Artificial Sequence: Synthetic oligonucleotide
ucacgucuucgaugucaa

SEQ ID NO: 298 - RNA, 18 nt, Artificial Sequence
  Description of Artificial Sequence: Synthetic oligonucleotide
auuauucacgucuucgau

SEQ ID NO: 299 - RNA, 18 nt, Artificial Sequence
  Description of Artificial Sequence: Synthetic oligonucleotide
guaugauuauucacgucu

SEQ ID NO: 300 - RNA, 18 nt, Artificial Sequence
  Description of Artificial Sequence: Synthetic oligonucleotide
aaucaguaugauuauuca

SEQ ID NO: 301 - RNA, 18 nt, Artificial Sequence
  Description of Artificial Sequence: Synthetic oligonucleotide
uaggcaaucaguaugauu

SEQ ID NO: 302 - RNA, 18 nt, Artificial Sequence
  Description of Artificial Sequence: Synthetic oligonucleotide
aguuuuaggcaaucagua

SEQ ID NO: 303 - RNA, 18 nt, Artificial Sequence
  Description of Artificial Sequence: Synthetic oligonucleotide
cuauuaguuuuaggcaau

SEQ ID NO: 304 - RNA, 18 nt, Artificial Sequence
  Description of Artificial Sequence: Synthetic oligonucleotide
ucuuucuauuaguuuuag

SEQ ID NO: 305 - RNA, 18 nt, Artificial Sequence
  Description of Artificial Sequence: Synthetic oligonucleotide
ucauuucuuucuauuagu

SEQ ID NO: 306 - RNA, 18 nt, Artificial Sequence
  Description of Artificial Sequence: Synthetic oligonucleotide
cagucucauuucuuucua

SEQ ID NO: 307 - RNA, 18 nt, Artificial Sequence
  Description of Artificial Sequence: Synthetic oligonucleotide
ucgagcagucucauuucu

SEQ ID NO: 308 - RNA, 18 nt, Artificial Sequence
  Description of Artificial Sequence: Synthetic oligonucleotide
uuccaucgagcagucuca

SEQ ID NO: 309 - RNA, 18 nt, Artificial Sequence
  Description of Artificial Sequence: Synthetic oligonucleotide
cauuuuuccaucgagcag

SEQ ID NO: 310 - RNA, 18 nt, Artificial Sequence
  Description of Artificial Sequence: Synthetic oligonucleotide
uuucacauuuuuccaucg

SEQ ID NO: 311 - RNA, 18 nt, Artificial Sequence
  Description of Artificial Sequence: Synthetic oligonucleotide
uuuacuuucacauuuuuc

SEQ ID NO: 312 - RNA, 18 nt, Artificial Sequence
  Description of Artificial Sequence: Synthetic oligonucleotide
caaaguuuacuuucacau

SEQ ID NO: 313 - RNA, 18 nt, Artificial Sequence
  Description of Artificial Sequence: Synthetic oligonucleotide
auuaucaaaguuuacuuu

SEQ ID NO: 314 - RNA, 18 nt, Artificial Sequence
  Description of Artificial Sequence: Synthetic oligonucleotide
ccuacauuaucaaaguuu

SEQ ID NO: 315 - RNA, 18 nt, Artificial Sequence
  Description of Artificial Sequence: Synthetic oligonucleotide
caaauccuacauuaucaa

SEQ ID NO: 316 - RNA, 18 nt, Artificial Sequence
  Description of Artificial Sequence: Synthetic oligonucleotide
auacccaaauccuacauu

SEQ ID NO: 317 - RNA, 18 nt, Artificial Sequence
  Description of Artificial Sequence: Synthetic oligonucleotide
gagagauacccaaauccu

SEQ ID NO: 318 - RNA, 18 nt, Artificial Sequence
  Description of Artificial Sequence: Synthetic oligonucleotide
gcaaagagagauacccaa

SEQ ID NO: 319 - RNA, 18 nt, Artificial Sequence
  Description of Artificial Sequence: Synthetic oligonucleotide
uugaagcaaagagagaua

SEQ ID NO: 320 - RNA, 18 nt, Artificial Sequence
  Description of Artificial Sequence: Synthetic oligonucleotide
cagagaaaauaguguuca

SEQ ID NO: 321 - RNA, 18 nt, Artificial Sequence
  Description of Artificial Sequence: Synthetic oligonucleotide
auauucagagaaaauagu

SEQ ID NO: 322 - RNA, 18 nt, Artificial Sequence
  Description of Artificial Sequence: Synthetic oligonucleotide
uaaaaauauucagagaaa

SEQ ID NO: 323 - RNA, 18 nt, Artificial Sequence
  Description of Artificial Sequence: Synthetic oligonucleotide
aacaauaaaaauauucag

SEQ ID NO: 324 - RNA, 18 nt, Artificial Sequence
  Description of Artificial Sequence: Synthetic oligonucleotide
uuccaaacaauaaaaaua

SEQ ID NO: 325 - RNA, 18 nt, Artificial Sequence
  Description of Artificial Sequence: Synthetic oligonucleotide
uauuauuccaaacaauaa

SEQ ID NO: 326 - RNA, 18 nt, Artificial Sequence
  Description of Artificial Sequence: Synthetic oligonucleotide
uuuguuauuauuccaaac

SEQ ID NO: 327 - RNA, 18 nt, Artificial Sequence
  Description of Artificial Sequence: Synthetic oligonucleotide
auuauuuuguuauuauuc

SEQ ID NO: 328 - RNA, 18 nt, Artificial Sequence
  Description of Artificial Sequence: Synthetic oligonucleotide
augucauuauuuuguuau

SEQ ID NO: 329 - RNA, 18 nt, Artificial Sequence
  Description of Artificial Sequence: Synthetic oligonucleotide
gauguaugucauuauuuu

SEQ ID NO: 330 - RNA, 18 nt, Artificial Sequence
  Description of Artificial Sequence: Synthetic oligonucleotide
uaauagauguaugucauu

SEQ ID NO: 331 - RNA, 18 nt, Artificial Sequence
  Description of Artificial Sequence: Synthetic oligonucleotide
cuaaauaauagauguaug

SEQ ID NO: 332 - RNA, 18 nt, Artificial Sequence
  Description of Artificial Sequence: Synthetic oligonucleotide
aggaacuaaauaauagau

SEQ ID NO: 333 - RNA, 18 nt, Artificial Sequence
  Description of Artificial Sequence: Synthetic oligonucleotide
uucuuaggaacuaaauaa

SEQ ID NO: 334 - RNA, 18 nt, Artificial Sequence
  Description of Artificial Sequence: Synthetic oligonucleotide
acuuuuucuuaggaacua

SEQ ID NO: 335 - RNA, 18 nt, Artificial Sequence
  Description of Artificial Sequence: Synthetic oligonucleotide
uauauacuuuuucuuagg

SEQ ID NO: 336 - RNA, 18 nt, Artificial Sequence
  Description of Artificial Sequence: Synthetic oligonucleotide
agaaauauauacuuuuuc

SEQ ID NO: 337 - RNA, 18 nt, Artificial Sequence
  Description of Artificial Sequence: Synthetic oligonucleotide
uagaaagaaauauauacu

SEQ ID NO: 338 - RNA, 18 nt, Artificial Sequence
  Description of Artificial Sequence: Synthetic oligonucleotide
uuaaauagaaagaaauau

SEQ ID NO: 339 - RNA, 18 nt, Artificial Sequence
  Description of Artificial Sequence: Synthetic oligonucleotide
auuuuuuaaauagaaaga

SEQ ID NO: 340 - RNA, 18 nt, Artificial Sequence
  Description of Artificial Sequence: Synthetic oligonucleotide
uugaaauuuuuuaaauag

SEQ ID NO: 341 - RNA, 18 nt, Artificial Sequence
  Description of Artificial Sequence: Synthetic oligonucleotide
acaaauugaaauuuuuua

SEQ ID NO: 342 - RNA, 18 nt, Artificial Sequence
  Description of Artificial Sequence: Synthetic oligonucleotide
uacuaacaaauugaaauu

SEQ ID NO: 343 - RNA, 18 nt, Artificial Sequence
  Description of Artificial Sequence: Synthetic oligonucleotide
acuuguacuaacaaauug

SEQ ID NO: 344 - RNA, 18 nt, Artificial Sequence
  Description of Artificial Sequence: Synthetic oligonucleotide
cauaaacuuguacuaaca

SEQ ID NO: 345 - RNA, 18 nt, Artificial Sequence
  Description of Artificial Sequence: Synthetic oligonucleotide
gggcucauaaacuuguac

SEQ ID NO: 346 - RNA, 18 nt, Artificial Sequence
  Description of Artificial Sequence: Synthetic oligonucleotide
caucugggcucauaaacu

SEQ ID NO: 347 - RNA, 18 nt, Artificial Sequence
  Description of Artificial Sequence: Synthetic oligonucleotide
ucacccaucugggcucau

SEQ ID NO: 348 - RNA, 18 nt, Artificial Sequence
  Description of Artificial Sequence: Synthetic oligonucleotide
aguuuucacccaucuggg

SEQ ID NO: 349 - RNA, 18 nt, Artificial Sequence
  Description of Artificial Sequence: Synthetic oligonucleotide
aauaaaguuuucacccau

SEQ ID NO: 350 - RNA, 18 nt, Artificial Sequence
  Description of Artificial Sequence: Synthetic oligonucleotide
cauguaauaaaguuuuca

SEQ ID NO: 351 - RNA, 18 nt, Artificial Sequence
  Description of Artificial Sequence: Synthetic oligonucleotide
ccuuacauguaauaaagu

SEQ ID NO: 352 - RNA, 18 nt, Artificial Sequence
  Description of Artificial Sequence: Synthetic oligonucleotide
gcaguccuuacauguaau

SEQ ID NO: 353 - RNA, 18 nt, Artificial Sequence
  Description of Artificial Sequence: Synthetic oligonucleotide
uaucugcaguccuuacau

SEQ ID NO: 354 - RNA, 18 nt, Artificial Sequence
  Description of Artificial Sequence: Synthetic oligonucleotide
gacuauaucugcaguccu

SEQ ID NO: 355 - RNA, 18 nt, Artificial Sequence
  Description of Artificial Sequence: Synthetic oligonucleotide
cuacugacuauaucugca

SEQ ID NO: 356 - RNA, 18 nt, Artificial Sequence
  Description of Artificial Sequence: Synthetic oligonucleotide
ggucacuacugacuauau

SEQ ID NO: 357 - RNA, 18 nt, Artificial Sequence
  Description of Artificial Sequence: Synthetic oligonucleotide
ggucuggucacuacugac

SEQ ID NO: 358 - RNA, 18 nt, Artificial Sequence
  Description of Artificial Sequence: Synthetic oligonucleotide
uguuuggucuggucacua

SEQ ID NO: 359 - RNA, 18 nt, Artificial Sequence
  Description of Artificial Sequence: Synthetic oligonucleotide
gucuuuguuuggucuggu

SEQ ID NO: 360 - RNA, 18 nt, Artificial Sequence
  Description of Artificial Sequence: Synthetic oligonucleotide
aagaggucuuuguuuggu

SEQ ID NO: 361 - RNA, 18 nt, Artificial Sequence
  Description of Artificial Sequence: Synthetic oligonucleotide
agacaaagaggucuuugu

SEQ ID NO: 362 - RNA, 18 nt, Artificial Sequence
  Description of Artificial Sequence: Synthetic oligonucleotide
aaaaaagacaaagagguc

SEQ ID NO: 363 - RNA, 18 nt, Artificial Sequence
  Description of Artificial Sequence: Synthetic oligonucleotide
acaagaaaaaagacaaag

SEQ ID NO: 364 - RNA, 18 nt, Artificial Sequence
  Description of Artificial Sequence: Synthetic oligonucleotide
aaaauacaagaaaaaaga

SEQ ID NO: 365 - RNA, 18 nt, Artificial Sequence
  Description of Artificial Sequence: Synthetic oligonucleotide
caaagaaaauacaagaaa

SEQ ID NO: 366 - RNA, 18 nt, Artificial Sequence
  Description of Artificial Sequence: Synthetic oligonucleotide
agaaacaaagaaaauaca

SEQ ID NO: 367 - RNA, 18 nt, Artificial Sequence
  Description of Artificial Sequence: Synthetic oligonucleotide
aauauagaaacaaagaaa

SEQ ID NO: 368 - RNA, 18 nt, Artificial Sequence
  Description of Artificial Sequence: Synthetic oligonucleotide
agagcaauauagaaacaa

SEQ ID NO: 369 - RNA, 18 nt, Artificial Sequence
  Description of Artificial Sequence: Synthetic oligonucleotide
uagaaagagcaauauaga

SEQ ID NO: 370 - RNA, 18 nt, Artificial Sequence
  Description of Artificial Sequence: Synthetic oligonucleotide
uuauauagaaagagcaau

SEQ ID NO: 371 - RNA, 18 nt, Artificial Sequence
  Description of Artificial Sequence: Synthetic oligonucleotide
cuuguuuauauagaaaga

SEQ ID NO: 372 - RNA, 18 nt, Artificial Sequence
  Description of Artificial Sequence: Synthetic oligonucleotide
auuuacuuguuuauauag

SEQ ID NO: 373 - RNA, 18 nt, Artificial Sequence
  Description of Artificial Sequence: Synthetic oligonucleotide
uauuaauuuacuuguuua

SEQ ID NO: 374 - RNA, 18 nt, Artificial Sequence
  Description of Artificial Sequence: Synthetic oligonucleotide
ugauuuauuaauuuacuu

SEQ ID NO: 375 - RNA, 18 nt, Artificial Sequence
  Description of Artificial Sequence: Synthetic oligonucleotide
guuacugauuuauuaauu

SEQ ID NO: 376 - RNA, 18 nt, Artificial Sequence
  Description of Artificial Sequence: Synthetic oligonucleotide
gcaaaguuacugauuuau

SEQ ID NO: 377 - RNA, 18 nt, Artificial Sequence
  Description of Artificial Sequence: Synthetic oligonucleotide
aaauggcaaaguuacuga

SEQ ID NO: 378 - RNA, 18 nt, Artificial Sequence
  Description of Artificial Sequence: Synthetic oligonucleotide
auaaaaaauggcaaaguu

SEQ ID NO: 379 - RNA, 18 nt, Artificial Sequence
  Description of Artificial Sequence: Synthetic oligonucleotide
ucacaauaaaaaauggca

SEQ ID NO: 380 - RNA, 18 nt, Artificial Sequence
  Description of Artificial Sequence: Synthetic oligonucleotide
ucuaaucacaauaaaaaa

SEQ ID NO: 381 - RNA, 18 nt, Artificial Sequence
  Description of Artificial Sequence: Synthetic oligonucleotide
agccuucuaaucacaaua

SEQ ID NO: 382 - RNA, 18 nt, Artificial Sequence
  Description of Artificial Sequence: Synthetic oligonucleotide
aaacaagccuucuaauca

SEQ ID NO: 383 - RNA, 18 nt, Artificial Sequence
  Description of Artificial Sequence: Synthetic oligonucleotide
cagggaaacaagccuucu

SEQ ID NO: 384 - RNA, 18 nt, Artificial Sequence
  Description of Artificial Sequence: Synthetic oligonucleotide
cugaucagggaaacaagc

SEQ ID NO: 385 - RNA, 18 nt, Artificial Sequence
  Description of Artificial Sequence: Synthetic oligonucleotide
gguagcugaucagggaaa

SEQ ID NO: 386 - RNA, 18 nt, Artificial Sequence
  Description of Artificial Sequence: Synthetic oligonucleotide
guuuugguagcugaucag

SEQ ID NO: 387 - RNA, 18 nt, Artificial Sequence
  Description of Artificial Sequence: Synthetic oligonucleotide
auuccguuuugguagcug

SEQ ID NO: 388 - RNA, 18 nt, Artificial Sequence
  Description of Artificial Sequence: Synthetic oligonucleotide
aguguauuccguuuuggu

SEQ ID NO: 389 - RNA, 18 nt, Artificial Sequence
  Description of Artificial Sequence: Synthetic oligonucleotide
uguuaaguguauuccguu

SEQ ID NO: 390 - RNA, 18 nt, Artificial Sequence
  Description of Artificial Sequence: Synthetic oligonucleotide
cuaucuguuaaguguauu

SEQ ID NO: 391 - RNA, 18 nt, Artificial Sequence
  Description of Artificial Sequence: Synthetic oligonucleotide
augaucuaucuguuaagu

SEQ ID NO: 392 - RNA, 18 nt, Artificial Sequence
  Description of Artificial Sequence: Synthetic oligonucleotide
ggaagaugaucuaucugu

SEQ ID NO: 393 - RNA, 18 nt, Artificial Sequence
  Description of Artificial Sequence: Synthetic oligonucleotide
guuuuggaagaugaucua

SEQ ID NO: 394 - RNA, 18 nt, Artificial Sequence
  Description of Artificial Sequence: Synthetic oligonucleotide
uauguguuuuggaagaug

SEQ ID NO: 395 - RNA, 18 nt, Artificial Sequence
  Description of Artificial Sequence: Synthetic oligonucleotide
aaguguauguguuuugga

SEQ ID NO: 396 - RNA, 18 nt, Artificial Sequence
  Description of Artificial Sequence: Synthetic oligonucleotide
guauuaaguguauguguu

SEQ ID NO: 397 - RNA, 18 nt, Artificial Sequence
  Description of Artificial Sequence: Synthetic oligonucleotide
uagguguauuaaguguau

SEQ ID NO: 398 - RNA, 18 nt, Artificial Sequence
  Description of Artificial Sequence: Synthetic oligonucleotide
ccaauuagguguauuaag

SEQ ID NO: 399 - RNA, 18 nt, Artificial Sequence
  Description of Artificial Sequence: Synthetic oligonucleotide
acaauccaauuaggugua

SEQ ID NO: 400 - RNA, 18 nt, Artificial Sequence
  Description of Artificial Sequence: Synthetic oligonucleotide
uaauuacaauccaauuag

SEQ ID NO: 401 - RNA, 18 nt, Artificial Sequence
  Description of Artificial Sequence: Synthetic oligonucleotide
ccaauuaauuacaaucca

SEQ ID NO: 402 - RNA, 18 nt, Artificial Sequence
  Description of Artificial Sequence: Synthetic oligonucleotide
cccuaccaauuaauuaca

SEQ ID NO: 403 - RNA, 18 nt, Artificial Sequence
  Description of Artificial Sequence: Synthetic oligonucleotide
uuaaucccuaccaauuaa

SEQ ID NO: 404 - RNA, 18 nt, Artificial Sequence
  Description of Artificial Sequence: Synthetic oligonucleotide
agcaguuaaucccuacca

SEQ ID NO: 405 - RNA, 18 nt, Artificial Sequence
  Description of Artificial Sequence: Synthetic oligonucleotide
ucagcagcaguuaauccc

SEQ ID NO: 406 - RNA, 18 nt, Artificial Sequence
  Description of Artificial Sequence: Synthetic oligonucleotide
agaacucagcagcaguua

SEQ ID NO: 407 - RNA, 18 nt, Artificial Sequence
  Description of Artificial Sequence: Synthetic oligonucleotide
auaauagaacucagcagc

SEQ ID NO: 408 - RNA, 18 nt, Artificial Sequence
  Description of Artificial Sequence: Synthetic oligonucleotide
uccaaauaauagaacuca

SEQ ID NO: 409 - RNA, 18 nt, Artificial Sequence
  Description of Artificial Sequence: Synthetic oligonucleotide
uuugauccaaauaauaga

SEQ ID NO: 410 - RNA, 18 nt, Artificial Sequence
  Description of Artificial Sequence: Synthetic oligonucleotide
caaacuuugauccaaaua

SEQ ID NO: 411 - RNA, 18 nt, Artificial Sequence
  Description of Artificial Sequence: Synthetic oligonucleotide
uuccccaaacuuugaucc

SEQ ID NO: 412 - RNA, 18 nt, Artificial Sequence
  Description of Artificial Sequence: Synthetic oligonucleotide
ugucauuccccaaacuuu

SEQ ID NO: 413 - RNA, 18 nt, Artificial Sequence
  Description of Artificial Sequence: Synthetic oligonucleotide
cuaaaugucauuccccaa

SEQ ID NO: 414 - RNA, 18 nt, Artificial Sequence
  Description of Artificial Sequence: Synthetic oligonucleotide
aaaaccuaaaugucauuc

SEQ ID NO: 415 - RNA, 18 nt, Artificial Sequence
  Description of Artificial Sequence: Synthetic oligonucleotide
auucuaaaaccuaaaugu

SEQ ID NO: 416 - RNA, 18 nt, Artificial Sequence
  Description of Artificial Sequence: Synthetic oligonucleotide
uucuaauucuaaaaccua

SEQ ID NO: 417 - RNA, 18 nt, Artificial Sequence
  Description of Artificial Sequence: Synthetic oligonucleotide
ccugguucuaauucuaaa

SEQ ID NO: 418 - RNA, 18 nt, Artificial Sequence
  Description of Artificial Sequence: Synthetic oligonucleotide
cuaugccugguucuaauu

SEQ ID NO: 419 - RNA, 18 nt, Artificial Sequence
  Description of Artificial Sequence: Synthetic oligonucleotide
uauccuuuuaagaauuuu

SEQ ID NO: 420 - RNA, 18 nt, Artificial Sequence
  Description of Artificial Sequence: Synthetic oligonucleotide
gcaacuauccuuuuaaga

SEQ ID NO: 421 - RNA, 18 nt, Artificial Sequence
  Description of Artificial Sequence: Synthetic oligonucleotide
ggguugcaacuauccuuu

SEQ ID NO: 422 - RNA, 18 nt, Artificial Sequence
  Description of Artificial Sequence: Synthetic oligonucleotide
aggcaggguugcaacuau

SEQ ID NO: 423 - RNA, 18 nt, Artificial Sequence
  Description of Artificial Sequence: Synthetic oligonucleotide
cauaaaggcaggguugca

SEQ ID NO: 424 - RNA, 18 nt, Artificial Sequence
  Description of Artificial Sequence: Synthetic oligonucleotide
ggauacauaaaggcaggg

SEQ ID NO: 425 - RNA, 18 nt, Artificial Sequence
  Description of Artificial Sequence: Synthetic oligonucleotide
uaccaggauacauaaagg

SEQ ID NO: 426 - RNA, 18 nt, Artificial Sequence
  Description of Artificial Sequence: Synthetic oligonucleotide
gauaguaccaggauacau

SEQ ID NO: 427 - RNA, 18 nt, Artificial Sequence
  Description of Artificial Sequence: Synthetic oligonucleotide
guaaggauaguaccagga

SEQ ID NO: 428 - RNA, 18 nt, Artificial Sequence
  Description of Artificial Sequence: Synthetic oligonucleotide
acaauguaaggauaguac

SEQ ID NO: 429 - RNA, 18 nt, Artificial Sequence
  Description of Artificial Sequence: Synthetic oligonucleotide
uuguaacaauguaaggau

SEQ ID NO: 430 - RNA, 18 nt, Artificial Sequence
  Description of Artificial Sequence: Synthetic oligonucleotide
cuuuauuguaacaaugua

SEQ ID NO: 431 - RNA, 18 nt, Artificial Sequence
  Description of Artificial Sequence: Synthetic oligonucleotide
uuucucuuuauuguaaca

SEQ ID NO: 432 - RNA, 18 nt, Artificial Sequence
  Description of Artificial Sequence: Synthetic oligonucleotide
uaagauuucucuuuauug

SEQ ID NO: 433 - RNA, 18 nt, Artificial Sequence
  Description of Artificial Sequence: Synthetic oligonucleotide
aaauuuaagauuucucuu

SEQ ID NO: 434 - RNA, 18 nt, Artificial Sequence
  Description of Artificial Sequence: Synthetic oligonucleotide
auugaaaauuuaagauuu

SEQ ID NO: 435 - RNA, 18 nt, Artificial Sequence
  Description of Artificial Sequence: Synthetic oligonucleotide
aagugauugaaaauuuaa

SEQ ID NO: 436 - RNA, 18 nt, Artificial Sequence
  Description of Artificial Sequence: Synthetic oligonucleotide
gaucaaagugauugaaaa

SEQ ID NO: 437 - RNA, 18 nt, Artificial Sequence
  Description of Artificial Sequence: Synthetic oligonucleotide
agggugaucaaagugauu

SEQ ID NO: 438 - RNA, 18 nt, Artificial Sequence
  Description of Artificial Sequence: Synthetic oligonucleotide
ucugcagggugaucaaag

SEQ ID NO: 439 - RNA, 18 nt, Artificial Sequence
  Description of Artificial Sequence: Synthetic oligonucleotide
auuuaucugcagggugau

SEQ ID NO: 440 - RNA, 18 nt, Artificial Sequence
  Description of Artificial Sequence: Synthetic oligonucleotide
cuaaaauuuaucugcagg

SEQ ID NO: 441 - RNA, 18 nt, Artificial Sequence
  Description of Artificial Sequence: Synthetic oligonucleotide
aucugcuaaaauuuaucu

SEQ ID NO: 442 - RNA, 18 nt, Artificial Sequence
  Description of Artificial Sequence: Synthetic oligonucleotide
ggaucaucugcuaaaauu

SEQ ID NO: 443 - RNA, 18 nt, Artificial Sequence
  Description of Artificial Sequence: Synthetic oligonucleotide
ucuaaggaucaucugcua

SEQ ID NO: 444 - RNA, 18 nt, Artificial Sequence
  Description of Artificial Sequence: Synthetic oligonucleotide
uuagaucuaaggaucauc

SEQ ID NO: 445 - RNA, 18 nt, Artificial Sequence
  Description of Artificial Sequence: Synthetic oligonucleotide
acaacuuagaucuaagga

SEQ ID NO: 446 - RNA, 18 nt, Artificial Sequence
  Description of Artificial Sequence: Synthetic oligonucleotide
uaauuacaacuuagaucu

SEQ ID NO: 447 - RNA, 18 nt, Artificial Sequence
  Description of Artificial Sequence: Synthetic oligonucleotide
ccaaauaauuacaacuua

SEQ ID NO: 448 - RNA, 18 nt, Artificial Sequence
  Description of Artificial Sequence: Synthetic oligonucleotide
aucagccaaauaauuaca

SEQ ID NO: 449 - RNA, 18 nt, Artificial Sequence
  Description of Artificial Sequence: Synthetic oligonucleotide
gcucuaucagccaaauaa

SEQ ID NO: 450 - RNA, 18 nt, Artificial Sequence
  Description of Artificial Sequence: Synthetic oligonucleotide
caauagcucuaucagcca

SEQ ID NO: 451 - RNA, 18 nt, Artificial Sequence
  Description of Artificial Sequence: Synthetic oligonucleotide
ugggucaauagcucuauc

SEQ ID NO: 452 - RNA, 18 nt, Artificial Sequence
  Description of Artificial Sequence: Synthetic oligonucleotide
acacaugggucaauagcu

SEQ ID NO: 453 - RNA, 18 nt, Artificial Sequence
  Description of Artificial Sequence: Synthetic oligonucleotide
ugccaacacaugggucaa

SEQ ID NO: 454 - RNA, 18 nt, Artificial Sequence
  Description of Artificial Sequence: Synthetic oligonucleotide
acaaaugccaacacaugg

SEQ ID NO: 455 - RNA, 18 nt, Artificial Sequence
  Description of Artificial Sequence: Synthetic oligonucleotide
gucuuacaaaugccaaca

SEQ ID NO: 456 - RNA, 18 nt, Artificial Sequence
  Description of Artificial Sequence: Synthetic oligonucleotide
agaaagucuuacaaaugc

SEQ ID NO: 457 - RNA, 18 nt, Artificial Sequence
  Description of Artificial Sequence: Synthetic oligonucleotide
uuuuuagaaagucuuaca

SEQ ID NO: 458 - RNA, 18 nt, Artificial Sequence
  Description of Artificial Sequence: Synthetic oligonucleotide
agcacuuuuuagaaaguc

SEQ ID NO: 459 - RNA, 18 nt, Artificial Sequence
  Description of Artificial Sequence: Synthetic oligonucleotide
gcuggagcacuuuuuaga

SEQ ID NO: 460 - RNA, 18 nt, Artificial Sequence
  Description of Artificial Sequence: Synthetic oligonucleotide
aauuugcuggagcacuuu

SEQ ID NO: 461 - RNA, 18 nt, Artificial Sequence
  Description of Artificial Sequence: Synthetic oligonucleotide
auuaaaauuugcuggagc

SEQ ID NO: 462 - RNA, 18 nt, Artificial Sequence
  Description of Artificial Sequence: Synthetic oligonucleotide
gcaguauuaaaauuugcu

SEQ ID NO: 463 - RNA, 18 nt, Artificial Sequence
  Description of Artificial Sequence: Synthetic oligonucleotide
uuaaagcaguauuaaaau

SEQ ID NO: 464 - RNA, 18 nt, Artificial Sequence
  Description of Artificial Sequence: Synthetic oligonucleotide
gauauuuaaagcaguauu

SEQ ID NO: 465 - RNA, 18 nt, Artificial Sequence
  Description of Artificial Sequence: Synthetic oligonucleotide
gucaugauauuuaaagca

SEQ ID NO: 466 - RNA, 18 nt, Artificial Sequence
  Description of Artificial Sequence: Synthetic oligonucleotide
auggugucaugauauuua

SEQ ID NO: 467 - RNA, 18 nt, Artificial Sequence
  Description of Artificial Sequence: Synthetic oligonucleotide
aguucauggugucaugau

SEQ ID NO: 468 - RNA, 18 nt, Artificial Sequence
  Description of Artificial Sequence: Synthetic oligonucleotide
uuuagaguucaugguguc

SEQ ID NO: 469 - RNA, 18 nt, Artificial Sequence
  Description of Artificial Sequence: Synthetic oligonucleotide
aauucuuuagaguucaug

SEQ ID NO: 470 - RNA, 18 nt, Artificial Sequence
  Description of Artificial Sequence: Synthetic oligonucleotide
uuuucaauucuuuagagu

SEQ ID NO: 471 - RNA, 18 nt, Artificial Sequence
  Description of Artificial Sequence: Synthetic oligonucleotide
agcacuuuucaauucuuu

SEQ ID NO: 472 - RNA, 18 nt, Artificial Sequence
  Description of Artificial Sequence: Synthetic oligonucleotide
ucacaagcacuuuucaau

SEQ ID NO: 473 - RNA, 18 nt, Artificial Sequence
  Description of Artificial Sequence: Synthetic oligonucleotide
ccaacucacaagcacuuu

SEQ ID NO: 474 - RNA, 18 nt, Artificial Sequence
  Description of Artificial Sequence: Synthetic oligonucleotide
gauaaccaacucacaagc

SEQ ID NO: 475 - RNA, 18 nt, Artificial Sequence
  Description of Artificial Sequence: Synthetic oligonucleotide
cccuugauaaccaacuca

SEQ ID NO: 476 - RNA, 18 nt, Artificial Sequence
  Description of Artificial Sequence: Synthetic oligonucleotide
uccuccccuugauaacca

SEQ ID NO: 477 - RNA, 18 nt, Artificial Sequence
  Description of Artificial Sequence: Synthetic oligonucleotide
auauauccuccccuugau

SEQ ID NO: 478 - RNA, 18 nt, Artificial Sequence
  Description of Artificial Sequence: Synthetic oligonucleotide
auuugauauauccucccc

SEQ ID NO: 479 - RNA, 18 nt, Artificial Sequence
  Description of Artificial Sequence: Synthetic oligonucleotide
uggccauuugauauaucc

SEQ ID NO: 480 - RNA, 18 nt, Artificial Sequence
  Description of Artificial Sequence: Synthetic oligonucleotide
caaaauggccauuugaua

SEQ ID NO: 481 - RNA, 18 nt, Artificial Sequence
  Description of Artificial Sequence: Synthetic oligonucleotide
uugaacaaaauggccauu

SEQ ID NO: 482 - RNA, 18 nt, Artificial Sequence
  Description of Artificial Sequence: Synthetic oligonucleotide
acauauugaacaaaaugg

SEQ ID NO: 483 - RNA, 18 nt, Artificial Sequence
  Description of Artificial Sequence: Synthetic oligonucleotide
agaacacauauugaacaa

SEQ ID NO: 484 - RNA, 18 nt, Artificial Sequence
  Description of Artificial Sequence: Synthetic oligonucleotide
uuucuagaacacauauug

SEQ ID NO: 485 - RNA, 18 nt, Artificial Sequence
  Description of Artificial Sequence: Synthetic oligonucleotide
uuucauuucuagaacaca

SEQ ID NO: 486 - RNA, 18 nt, Artificial Sequence
  Description of Artificial Sequence: Synthetic oligonucleotide
uggcuuuucauuucuaga

SEQ ID NO: 487 - RNA, 18 nt, Artificial Sequence
  Description of Artificial Sequence: Synthetic oligonucleotide
uaguauggcuuuucauuu

SEQ ID NO: 488 - RNA, 18 nt, Artificial Sequence
  Description of Artificial Sequence: Synthetic oligonucleotide
uauuuuaguauggcuuuu

SEQ ID NO: 489 - RNA, 18 nt, Artificial Sequence
  Description of Artificial Sequence: Synthetic oligonucleotide
gacaguauuuuaguaugg

SEQ ID NO: 490 - RNA, 18 nt, Artificial Sequence
  Description of Artificial Sequence: Synthetic oligonucleotide
accaagacaguauuuuag

SEQ ID NO: 491 - RNA, 18 nt, Artificial Sequence
  Description of Artificial Sequence: Synthetic oligonucleotide
uuuggaccaagacaguau

SEQ ID NO: 492 - RNA, 18 nt, Artificial Sequence
  Description of Artificial Sequence: Synthetic oligonucleotide
cagauuuuggaccaagac

SEQ ID NO: 493 - RNA, 18 nt, Artificial Sequence
  Description of Artificial Sequence: Synthetic oligonucleotide
uuacacagauuuuggacc

SEQ ID NO: 494 - RNA, 18 nt, Artificial Sequence
  Description of Artificial Sequence: Synthetic oligonucleotide
aaauuuuacacagauuuu

SEQ ID NO: 495 - RNA, 18 nt, Artificial Sequence
  Description of Artificial Sequence: Synthetic oligonucleotide
aaaacaaauuuuacacag

SEQ ID NO: 496 - RNA, 18 nt, Artificial Sequence
  Description of Artificial Sequence: Synthetic oligonucleotide
auuucaaaacaaauuuua

SEQ ID NO: 497 - RNA, 18 nt, Artificial Sequence
  Description of Artificial Sequence: Synthetic oligonucleotide
aagacauuucaaaacaaa

SEQ ID NO: 498 - RNA, 18 nt, Artificial Sequence
  Description of Artificial Sequence: Synthetic oligonucleotide
uuugaaagacauuucaaa

SEQ ID NO: 499 - RNA, 18 nt, Artificial Sequence
  Description of Artificial Sequence: Synthetic oligonucleotide
auauuuuugaaagacauu

SEQ ID NO: 500 - RNA, 18 nt, Artificial Sequence
  Description of Artificial Sequence: Synthetic oligonucleotide
agggaauauuuuugaaag

SEQ ID NO: 501 - RNA, 18 nt, Artificial Sequence
  Description of Artificial Sequence: Synthetic oligonucleotide
ucaaaagggaauauuuuu

SEQ ID NO: 502 - RNA, 18 nt, Artificial Sequence
  Description of Artificial Sequence: Synthetic oligonucleotide
aauuuucaaaagggaaua

SEQ ID NO: 503 - RNA, 18 nt, Artificial Sequence
  Description of Artificial Sequence: Synthetic oligonucleotide
gauauaauuuucaaaagg

SEQ ID NO: 504 - RNA, 18 nt, Artificial Sequence
  Description of Artificial Sequence: Synthetic oligonucleotide
uuacugauauaauuuuca

SEQ ID NO: 505 - RNA, 18 nt, Artificial Sequence
  Description of Artificial Sequence: Synthetic oligonucleotide
uauucuuacugauauaau

SEQ ID NO: 506 - RNA, 18 nt, Artificial Sequence
  Description of Artificial Sequence: Synthetic oligonucleotide
auaaauauucuuacugau

SEQ ID NO: 507 - RNA, 18 nt, Artificial Sequence
  Description of Artificial Sequence: Synthetic oligonucleotide
guuuaauaaauauucuua

SEQ ID NO: 508 - RNA, 18 nt, Artificial Sequence
  Description of Artificial Sequence: Synthetic oligonucleotide
cugauguuuaauaaauau

SEQ ID NO: 509 - RNA, 18 nt, Artificial Sequence
  Description of Artificial Sequence: Synthetic oligonucleotide
uagaccugauguuuaaua

SEQ ID NO: 510 - RNA, 18 nt, Artificial Sequence
  Description of Artificial Sequence: Synthetic oligonucleotide
uaauuuagaccugauguu

SEQ ID NO: 511 - RNA, 18 nt, Artificial Sequence
  Description of Artificial Sequence: Synthetic oligonucleotide
aaaaauaauuuagaccug

SEQ ID NO: 512 - RNA, 18 nt, Artificial Sequence
  Description of Artificial Sequence: Synthetic oligonucleotide
ggaguaaaaauaauuuag

SEQ ID NO: 513 - RNA, 18 nt, Artificial Sequence
  Description of Artificial Sequence: Synthetic oligonucleotide
acuuuggaguaaaaauaa

SEQ ID NO: 514 - RNA, 18 nt, Artificial Sequence
  Description of Artificial Sequence: Synthetic oligonucleotide
guuuuacuuuggaguaaa

SEQ ID NO: 515 - RNA, 18 nt, Artificial Sequence
  Description of Artificial Sequence: Synthetic oligonucleotide
ugcauguuuuacuuugga

SEQ ID NO: 516 - RNA, 18 nt, Artificial Sequence
  Description of Artificial Sequence: Synthetic oligonucleotide
uccauccuuugaaugugg

SEQ ID NO: 517 - RNA, 18 nt, Artificial Sequence
  Description of Artificial Sequence: Synthetic oligonucleotide
auccauccauccuuugaa

SEQ ID NO: 518 - RNA, 18 nt, Artificial Sequence
  Description of Artificial Sequence: Synthetic oligonucleotide
auuauauccauccauccu

SEQ ID NO: 519 - RNA, 18 nt, Artificial Sequence
  Description of Artificial Sequence: Synthetic oligonucleotide
cauacauuauauccaucc

SEQ ID NO: 520 - RNA, 18 nt, Artificial Sequence
  Description of Artificial Sequence: Synthetic oligonucleotide
ugcugcauacauuauauc

SEQ ID NO: 521 - RNA, 18 nt, Artificial Sequence
  Description of Artificial Sequence: Synthetic oligonucleotide
ucaacugcugcauacauu

SEQ ID NO: 522 - RNA, 18 nt, Artificial Sequence
  Description of Artificial Sequence: Synthetic oligonucleotide
uggaaucaacugcugcau

SEQ ID NO: 523 - RNA, 18 nt, Artificial Sequence
  Description of Artificial Sequence: Synthetic oligonucleotide
auuucuggaaucaacugc

SEQ ID NO: 524 - RNA, 18 nt, Artificial Sequence
  Description of Artificial Sequence: Synthetic oligonucleotide
aaagggcauucacaacca

SEQ ID NO: 525 - RNA, 18 nt, Artificial Sequence
  Description of Artificial Sequence: Synthetic oligonucleotide
uccuaaaagggcauucac

SEQ ID NO: 526 - RNA, 18 nt, Artificial Sequence
  Description of Artificial Sequence: Synthetic oligonucleotide
auugcuccuaaaagggca

SEQ ID NO: 527 - RNA, 18 nt, Artificial Sequence
  Description of Artificial Sequence: Synthetic oligonucleotide
auggaauugcuccuaaaa

SEQ ID NO: 528 - RNA, 18 nt, Artificial Sequence
  Description of Artificial Sequence: Synthetic oligonucleotide
gauggauggaauugcucc

SEQ ID NO: 529 - RNA, 18 nt, Artificial Sequence
  Description of Artificial Sequence: Synthetic oligonucleotide
uucaugauggauggaauu

SEQ ID NO: 530 - RNA, 18 nt, Artificial Sequence
  Description of Artificial Sequence: Synthetic oligonucleotide
gcacauucaugauggaug

SEQ ID NO: 531 - RNA, 18 nt, Artificial Sequence
  Description of Artificial Sequence: Synthetic oligonucleotide
cagaagcacauucaugau

SEQ ID NO: 532 - RNA, 18 nt, Artificial Sequence
  Description of Artificial Sequence: Synthetic oligonucleotide
caaaccagaagcacauuc

SEQ ID NO: 533 - RNA, 18 nt, Artificial Sequence
  Description of Artificial Sequence: Synthetic oligonucleotide
uaagacaaaccagaagca

SEQ ID NO: 534 - RNA, 18 nt, Artificial Sequence
  Description of Artificial Sequence: Synthetic oligonucleotide
gaauauaagacaaaccag

SEQ ID NO: 535 - RNA, 18 nt, Artificial Sequence
  Description of Artificial Sequence: Synthetic oligonucleotide
agccagaauauaagacaa

SEQ ID NO: 536 - RNA, 18 nt, Artificial Sequence
  Description of Artificial Sequence: Synthetic oligonucleotide
aaauuagccagaauauaa

SEQ ID NO: 537 - RNA, 18 nt, Artificial Sequence
  Description of Artificial Sequence: Synthetic oligonucleotide
gcugaaaauuagccagaa

SEQ ID NO: 538 - RNA, 18 nt, Artificial Sequence
  Description of Artificial Sequence: Synthetic oligonucleotide
augaugcugaaaauuagc

SEQ ID NO: 539 - RNA, 18 nt, Artificial Sequence
  Description of Artificial Sequence: Synthetic oligonucleotide
cgcccaugaugcugaaaa

SEQ ID NO: 540 - RNA, 18 nt, Artificial Sequence
  Description of Artificial Sequence: Synthetic oligonucleotide
auuuacgcccaugaugcu

SEQ ID NO: 541 - RNA, 18 nt, Artificial Sequence
  Description of Artificial Sequence: Synthetic oligonucleotide
aacaaauuuacgcccaug

SEQ ID NO: 542 - RNA, 18 nt, Artificial Sequence
  Description of Artificial Sequence: Synthetic oligonucleotide
cagcaaacaaauuuacgc

SEQ ID NO: 543 - RNA, 18 nt, Artificial Sequence
  Description of Artificial Sequence: Synthetic oligonucleotide
uuugccagcaaacaaauu

SEQ ID NO: 544 - RNA, 18 nt, Artificial Sequence
  Description of Artificial Sequence: Synthetic oligonucleotide
uagaauuugccagcaaac

SEQ ID NO: 545 - RNA, 18 nt, Artificial Sequence
  Description of Artificial Sequence: Synthetic oligonucleotide
agugguagaauuugccag

SEQ ID NO: 546 - RNA, 18 nt, Artificial Sequence
  Description of Artificial Sequence: Synthetic oligonucleotide
aauacagugguagaauuu

SEQ ID NO: 547 - RNA, 18 nt, Artificial Sequence
  Description of Artificial Sequence: Synthetic oligonucleotide
guguuaauacagugguag

SEQ ID NO: 548 - RNA, 18 nt, Artificial Sequence
  Description of Artificial Sequence: Synthetic oligonucleotide
uugugguguuaauacagu

SEQ ID NO: 549 - RNA, 18 nt, Artificial Sequence
  Description of Artificial Sequence: Synthetic oligonucleotide
accaguugugguguuaau

SEQ ID NO: 550 - RNA, 18 nt, Artificial Sequence
  Description of Artificial Sequence: Synthetic oligonucleotide
cugucaccaguuguggug

SEQ ID NO: 551 - RNA, 18 nt, Artificial Sequence
  Description of Artificial Sequence: Synthetic oligonucleotide
caaaccugucaccaguug

SEQ ID NO: 552 - RNA, 18 nt, Artificial Sequence
  Description of Artificial Sequence: Synthetic oligonucleotide
gaugucaaaccugucacc

SEQ ID NO: 553 - RNA, 18 nt, Artificial Sequence
  Description of Artificial Sequence: Synthetic oligonucleotide
ucuucgaugucaaaccug

SEQ ID NO: 554 - RNA, 18 nt, Artificial Sequence
  Description of Artificial Sequence: Synthetic oligonucleotide
ucacgucuucgaugucaa

SEQ ID NO: 555 - RNA, 18 nt, Artificial Sequence
  Description of Artificial Sequence: Synthetic oligonucleotide
auuauucacgucuucgau

SEQ ID NO: 556 - RNA, 18 nt, Artificial Sequence
  Description of Artificial Sequence: Synthetic oligonucleotide
guaugauuauucacgucu

SEQ ID NO: 557 - RNA, 18 nt, Artificial Sequence
  Description of Artificial Sequence: Synthetic oligonucleotide
aaucaguaugauuauuca

SEQ ID NO: 558 - RNA, 18 nt, Artificial Sequence
  Description of Artificial Sequence: Synthetic oligonucleotide
uaggcaaucaguaugauu

SEQ ID NO: 559 - RNA, 18 nt, Artificial Sequence
  Description of Artificial Sequence: Synthetic oligonucleotide
aguuuuaggcaaucagua

SEQ ID NO: 560 - RNA, 18 nt, Artificial Sequence
  Description of Artificial Sequence: Synthetic oligonucleotide
cuauuaguuuuaggcaau

SEQ ID NO: 561 - RNA, 18 nt, Artificial Sequence
  Description of Artificial Sequence: Synthetic oligonucleotide
ucuuucuauuaguuuuag

SEQ ID NO: 562 - RNA, 18 nt, Artificial Sequence
  Description of Artificial Sequence: Synthetic oligonucleotide
ucauuucuuucuauuagu

SEQ ID NO: 563 - RNA, 18 nt, Artificial Sequence
  Description of Artificial Sequence: Synthetic oligonucleotide
cagucucauuucuuucua

SEQ ID NO: 564 - RNA, 18 nt, Artificial Sequence
  Description of Artificial Sequence: Synthetic oligonucleotide
ucgagcagucucauuucu

SEQ ID NO: 565 - RNA, 18 nt, Artificial Sequence
  Description of Artificial Sequence: Synthetic oligonucleotide
uuccaucgagcagucuca

SEQ ID NO: 566 - RNA, 18 nt, Artificial Sequence
  Description of Artificial Sequence: Synthetic oligonucleotide
cauuuuuccaucgagcag

SEQ ID NO: 567 - RNA, 18 nt, Artificial Sequence
  Description of Artificial Sequence: Synthetic oligonucleotide
uuucacauuuuuccaucg

SEQ ID NO: 568 - RNA, 18 nt, Artificial Sequence
  Description of Artificial Sequence: Synthetic oligonucleotide
uuuacuuucacauuuuuc

SEQ ID NO: 569 - RNA, 18 nt, Artificial Sequence
  Description of Artificial Sequence: Synthetic oligonucleotide
caaaguuuacuuucacau

SEQ ID NO: 570 - RNA, 18 nt, Artificial Sequence
  Description of Artificial Sequence: Synthetic oligonucleotide
auuaucaaaguuuacuuu

SEQ ID NO: 571 - RNA, 18 nt, Artificial Sequence
  Description of Artificial Sequence: Synthetic oligonucleotide
ccuacauuaucaaaguuu

SEQ ID NO: 572 - RNA, 18 nt, Artificial Sequence
  Description of Artificial Sequence: Synthetic oligonucleotide
caaauccuacauuaucaa

SEQ ID NO: 573 - RNA, 18 nt, Artificial Sequence
  Description of Artificial Sequence: Synthetic oligonucleotide
auacccaaauccuacauu

SEQ ID NO: 574 - RNA, 18 nt, Artificial Sequence
  Description of Artificial Sequence: Synthetic oligonucleotide
gagagauacccaaauccu

SEQ ID NO: 575 - RNA, 18 nt, Artificial Sequence
  Description of Artificial Sequence: Synthetic oligonucleotide
gcaaagagagauacccaa

SEQ ID NO: 576 - RNA, 18 nt, Artificial Sequence
  Description of Artificial Sequence: Synthetic oligonucleotide
uugaagcaaagagagaua

SEQ ID NO: 577 - RNA, 18 nt, Artificial Sequence
  Description of Artificial Sequence: Synthetic oligonucleotide
cagagaaaauaguguuca

SEQ ID NO: 578 - RNA, 18 nt, Artificial Sequence
  Description of Artificial Sequence: Synthetic oligonucleotide
auauucagagaaaauagu

SEQ ID NO: 579 - RNA, 18 nt, Artificial Sequence
  Description of Artificial Sequence: Synthetic oligonucleotide
uaaaaauauucagagaaa

SEQ ID NO: 580 - RNA, 18 nt, Artificial Sequence
  Description of Artificial Sequence: Synthetic oligonucleotide
aacaauaaaaauauucag

SEQ ID NO: 581 - RNA, 18 nt, Artificial Sequence
  Description of Artificial Sequence: Synthetic oligonucleotide
uuccaaacaauaaaaaua

SEQ ID NO: 582 - RNA, 18 nt, Artificial Sequence
  Description of Artificial Sequence: Synthetic oligonucleotide
uauuauuccaaacaauaa

SEQ ID NO: 583 - RNA, 18 nt, Artificial Sequence
  Description of Artificial Sequence: Synthetic oligonucleotide
uuuguuauuauuccaaac

SEQ ID NO: 584 - RNA, 18 nt, Artificial Sequence
  Description of Artificial Sequence: Synthetic oligonucleotide
auuauuuuguuauuauuc

SEQ ID NO: 585 - RNA, 18 nt, Artificial Sequence
  Description of Artificial Sequence: Synthetic oligonucleotide
augucauuauuuuguuau

SEQ ID NO: 586 - RNA, 18 nt, Artificial Sequence
  Description of Artificial Sequence: Synthetic oligonucleotide
gauguaugucauuauuuu

SEQ ID NO: 587 - RNA, 18 nt, Artificial Sequence
  Description of Artificial Sequence: Synthetic oligonucleotide
uaauagauguaugucauu

SEQ ID NO: 588 - RNA, 18 nt, Artificial Sequence
  Description of Artificial Sequence: Synthetic oligonucleotide
cuaaauaauagauguaug

SEQ ID NO: 589 - RNA, 18 nt, Artificial Sequence
  Description of Artificial Sequence: Synthetic oligonucleotide
aggaacuaaauaauagau

SEQ ID NO: 590 - RNA, 18 nt, Artificial Sequence
  Description of Artificial Sequence: Synthetic oligonucleotide
uucuuaggaacuaaauaa

SEQ ID NO: 591 - RNA, 18 nt, Artificial Sequence
  Description of Artificial Sequence: Synthetic oligonucleotide
acuuuuucuuaggaacua

SEQ ID NO: 592 - RNA, 18 nt, Artificial Sequence
  Description of Artificial Sequence: Synthetic oligonucleotide
uauauacuuuuucuuagg

SEQ ID NO: 593 - RNA, 18 nt, Artificial Sequence
  Description of Artificial Sequence: Synthetic oligonucleotide
agaaauauauacuuuuuc

SEQ ID NO: 594 - RNA, 18 nt, Artificial Sequence
  Description of Artificial Sequence: Synthetic oligonucleotide
uagaaagaaauauauacu

SEQ ID NO: 595 - RNA, 18 nt, Artificial Sequence
  Description of Artificial Sequence: Synthetic oligonucleotide
uuaaauagaaagaaauau

SEQ ID NO: 596 - RNA, 18 nt, Artificial Sequence
  Description of Artificial Sequence: Synthetic oligonucleotide
auuuuuuaaauagaaaga

SEQ ID NO: 597 - RNA, 18 nt, Artificial Sequence
  Description of Artificial Sequence: Synthetic oligonucleotide
uugaaauuuuuuaaauag

SEQ ID NO: 598 - RNA, 18 nt, Artificial Sequence
  Description of Artificial Sequence: Synthetic oligonucleotide
acaaauugaaauuuuuua

SEQ ID NO: 599 - RNA, 18 nt, Artificial Sequence
  Description of Artificial Sequence: Synthetic oligonucleotide
uacuaacaaauugaaauu

SEQ ID NO: 600 - RNA, 18 nt, Artificial Sequence
  Description of Artificial Sequence: Synthetic oligonucleotide
acuuguacuaacaaauug

SEQ ID NO: 601 - RNA, 18 nt, Artificial Sequence
  Description of Artificial Sequence: Synthetic oligonucleotide
cauaaacuuguacuaaca

SEQ ID NO: 602 - RNA, 18 nt, Artificial Sequence
  Description of Artificial Sequence: Synthetic oligonucleotide
gggcucauaaacuuguac

SEQ ID NO: 603 - RNA, 18 nt, Artificial Sequence
  Description of Artificial Sequence: Synthetic oligonucleotide
caucugggcucauaaacu

SEQ ID NO: 604 - RNA, 18 nt, Artificial Sequence
  Description of Artificial Sequence: Synthetic oligonucleotide
ucacccaucugggcucau

SEQ ID NO: 605 - RNA, 18 nt, Artificial Sequence
  Description of Artificial Sequence: Synthetic oligonucleotide
aguuuucacccaucuggg

SEQ ID NO: 606 - RNA, 18 nt, Artificial Sequence
  Description of Artificial Sequence: Synthetic oligonucleotide
aauaaaguuuucacccau

SEQ ID NO: 607 - RNA, 18 nt, Artificial Sequence
  Description of Artificial Sequence: Synthetic oligonucleotide
cauguaauaaaguuuuca

SEQ ID NO: 608 - RNA, 18 nt, Artificial Sequence
  Description of Artificial Sequence: Synthetic oligonucleotide
ccuuacauguaauaaagu

SEQ ID NO: 609 - RNA, 18 nt, Artificial Sequence
  Description of Artificial Sequence: Synthetic oligonucleotide
gcaguccuuacauguaau

SEQ ID NO: 610 - RNA, 18 nt, Artificial Sequence
  Description of Artificial Sequence: Synthetic oligonucleotide
uaucugcaguccuuacau

SEQ ID NO: 611 - RNA, 18 nt, Artificial Sequence
  Description of Artificial Sequence: Synthetic oligonucleotide
gacuauaucugcaguccu

SEQ ID NO: 612 - RNA, 18 nt, Artificial Sequence
  Description of Artificial Sequence: Synthetic oligonucleotide
cuacugacuauaucugca

SEQ ID NO: 613 - RNA, 18 nt, Artificial Sequence
  Description of Artificial Sequence: Synthetic oligonucleotide
ggucacuacugacuauau

SEQ ID NO: 614 - RNA, 18 nt, Artificial Sequence
  Description of Artificial Sequence: Synthetic oligonucleotide
ggucuggucacuacugac

SEQ ID NO: 615 - RNA, 18 nt, Artificial Sequence
  Description of Artificial Sequence: Synthetic oligonucleotide
uguuuggucuggucacua

SEQ ID NO: 616 - RNA, 18 nt, Artificial Sequence
  Description of Artificial Sequence: Synthetic oligonucleotide
gucuuuguuuggucuggu

SEQ ID NO: 617 - RNA, 18 nt, Artificial Sequence
  Description of Artificial Sequence: Synthetic oligonucleotide
aagaggucuuuguuuggu

SEQ ID NO: 618 - RNA, 18 nt, Artificial Sequence
  Description of Artificial Sequence: Synthetic oligonucleotide
agacaaagaggucuuugu

SEQ ID NO: 619 - RNA, 18 nt, Artificial Sequence
  Description of Artificial Sequence: Synthetic oligonucleotide
aaaaaagacaaagagguc

SEQ ID NO: 620 - RNA, 18 nt, Artificial Sequence
  Description of Artificial Sequence: Synthetic oligonucleotide
acaagaaaaaagacaaag

SEQ ID NO: 621 - RNA, 18 nt, Artificial Sequence
  Description of Artificial Sequence: Synthetic oligonucleotide
aaaauacaagaaaaaaga

SEQ ID NO: 622 - RNA, 18 nt, Artificial Sequence
  Description of Artificial Sequence: Synthetic oligonucleotide
caaagaaaauacaagaaa

SEQ ID NO: 623 - RNA, 18 nt, Artificial Sequence
  Description of Artificial Sequence: Synthetic oligonucleotide
agaaacaaagaaaauaca

SEQ ID NO: 624 - RNA, 18 nt, Artificial Sequence
  Description of Artificial Sequence: Synthetic oligonucleotide
aauauagaaacaaagaaa

SEQ ID NO: 625 - RNA, 18 nt, Artificial Sequence
  Description of Artificial Sequence: Synthetic oligonucleotide
agagcaauauagaaacaa

SEQ ID NO: 626 - RNA, 18 nt, Artificial Sequence
  Description of Artificial Sequence: Synthetic oligonucleotide
uagaaagagcaauauaga

SEQ ID NO: 627 - RNA, 18 nt, Artificial Sequence
  Description of Artificial Sequence: Synthetic oligonucleotide
uuauauagaaagagcaau

SEQ ID NO: 628 - RNA, 18 nt, Artificial Sequence
  Description of Artificial Sequence: Synthetic oligonucleotide
cuuguuuauauagaaaga

SEQ ID NO: 629 - RNA, 18 nt, Artificial Sequence
  Description of Artificial Sequence: Synthetic oligonucleotide
auuuacuuguuuauauag

SEQ ID NO: 630 - RNA, 18 nt, Artificial Sequence
  Description of Artificial Sequence: Synthetic oligonucleotide
uauuaauuuacuuguuua

SEQ ID NO: 631 - RNA, 18 nt, Artificial Sequence
  Description of Artificial Sequence: Synthetic oligonucleotide
ugauuuauuaauuuacuu

SEQ ID NO: 632 - RNA, 18 nt, Artificial Sequence
  Description of Artificial Sequence: Synthetic oligonucleotide
guuacugauuuauuaauu

SEQ ID NO: 633 - RNA, 18 nt, Artificial Sequence
  Description of Artificial Sequence: Synthetic oligonucleotide
gcaaaguuacugauuuau

SEQ ID NO: 634 - RNA, 18 nt, Artificial Sequence
  Description of Artificial Sequence: Synthetic oligonucleotide
aaauggcaaaguuacuga

SEQ ID NO: 635 - RNA, 18 nt, Artificial Sequence
  Description of Artificial Sequence: Synthetic oligonucleotide
auaaaaaauggcaaaguu

SEQ ID NO: 636 - RNA, 18 nt, Artificial Sequence
  Description of Artificial Sequence: Synthetic oligonucleotide
ucacaauaaaaaauggca

SEQ ID NO: 637 - RNA, 18 nt, Artificial Sequence
  Description of Artificial Sequence: Synthetic oligonucleotide
ucuaaucacaauaaaaaa

SEQ ID NO: 638 - RNA, 18 nt, Artificial Sequence
  Description of Artificial Sequence: Synthetic oligonucleotide
agccuucuaaucacaaua

SEQ ID NO: 639 - RNA, 18 nt, Artificial Sequence
  Description of Artificial Sequence: Synthetic oligonucleotide
aaacaagccuucuaauca

SEQ ID NO: 640 - RNA, 18 nt, Artificial Sequence
  Description of Artificial Sequence: Synthetic oligonucleotide
cagggaaacaagccuucu

SEQ ID NO: 641 - RNA, 18 nt, Artificial Sequence
  Description of Artificial Sequence: Synthetic oligonucleotide
cugaucagggaaacaagc

SEQ ID NO: 642 - RNA, 18 nt, Artificial Sequence
  Description of Artificial Sequence: Synthetic oligonucleotide
gguagcugaucagggaaa

SEQ ID NO: 643 - RNA, 18 nt, Artificial Sequence
  Description of Artificial Sequence: Synthetic oligonucleotide
guuuugguagcugaucag

SEQ ID NO: 644 - RNA, 18 nt, Artificial Sequence
  Description of Artificial Sequence: Synthetic oligonucleotide
auuccguuuugguagcug

SEQ ID NO: 645 - RNA, 18 nt, Artificial Sequence
  Description of Artificial Sequence: Synthetic oligonucleotide
aguguauuccguuuuggu

SEQ ID NO: 646 - RNA, 18 nt, Artificial Sequence
  Description of Artificial Sequence: Synthetic oligonucleotide
uguuaaguguauuccguu

SEQ ID NO: 647 - RNA, 18 nt, Artificial Sequence
  Description of Artificial Sequence: Synthetic oligonucleotide
cuaucuguuaaguguauu

SEQ ID NO: 648 - RNA, 18 nt, Artificial Sequence
  Description of Artificial Sequence: Synthetic oligonucleotide
augaucuaucuguuaagu

SEQ ID NO: 649 - RNA, 18 nt, Artificial Sequence
  Description of Artificial Sequence: Synthetic oligonucleotide
ggaagaugaucuaucugu

SEQ ID NO: 650 - RNA, 18 nt, Artificial Sequence
  Description of Artificial Sequence: Synthetic oligonucleotide
guuuuggaagaugaucua

SEQ ID NO: 651 - RNA, 18 nt, Artificial Sequence
  Description of Artificial Sequence: Synthetic oligonucleotide
uauguguuuuggaagaug

SEQ ID NO: 652 - RNA, 18 nt, Artificial Sequence
  Description of Artificial Sequence: Synthetic oligonucleotide
aaguguauguguuuugga

SEQ ID NO: 653 - RNA, 18 nt, Artificial Sequence
  Description of Artificial Sequence: Synthetic oligonucleotide
guauuaaguguauguguu

SEQ ID NO: 654 - RNA, 18 nt, Artificial Sequence
  Description of Artificial Sequence: Synthetic oligonucleotide
uagguguauuaaguguau

SEQ ID NO: 655 - RNA, 18 nt, Artificial Sequence
  Description of Artificial Sequence: Synthetic oligonucleotide
ccaauuagguguauuaag

SEQ ID NO: 656 - RNA, 18 nt, Artificial Sequence
  Description of Artificial Sequence: Synthetic oligonucleotide
acaauccaauuaggugua

SEQ ID NO: 657 - RNA, 18 nt, Artificial Sequence
  Description of Artificial Sequence: Synthetic oligonucleotide
uaauuacaauccaauuag

SEQ ID NO: 658 - RNA, 18 nt, Artificial Sequence
  Description of Artificial Sequence: Synthetic oligonucleotide
ccaauuaauuacaaucca

SEQ ID NO: 659 - RNA, 18 nt, Artificial Sequence
  Description of Artificial Sequence: Synthetic oligonucleotide
cccuaccaauuaauuaca

SEQ ID NO: 660 - RNA, 18 nt, Artificial Sequence
  Description of Artificial Sequence: Synthetic oligonucleotide
uuaaucccuaccaauuaa

SEQ ID NO: 661 - RNA, 18 nt, Artificial Sequence
  Description of Artificial Sequence: Synthetic oligonucleotide
agcaguuaaucccuacca

SEQ ID NO: 662 - RNA, 18 nt, Artificial Sequence
  Description of Artificial Sequence: Synthetic oligonucleotide
ucagcagcaguuaauccc

SEQ ID NO: 663 - RNA, 18 nt, Artificial Sequence
  Description of Artificial Sequence: Synthetic oligonucleotide
agaacucagcagcaguua

SEQ ID NO: 664 - RNA, 18 nt, Artificial Sequence
  Description of Artificial Sequence: Synthetic oligonucleotide
auaauagaacucagcagc

SEQ ID NO: 665 - RNA, 18 nt, Artificial Sequence
  Description of Artificial Sequence: Synthetic oligonucleotide
uccaaauaauagaacuca

SEQ ID NO: 666 - RNA, 18 nt, Artificial Sequence
  Description of Artificial Sequence: Synthetic oligonucleotide
uuugauccaaauaauaga

SEQ ID NO: 667 - RNA, 18 nt, Artificial Sequence
  Description of Artificial Sequence: Synthetic oligonucleotide
caaacuuugauccaaaua

SEQ ID NO: 668 - RNA, 18 nt, Artificial Sequence
  Description of Artificial Sequence: Synthetic oligonucleotide
uuccccaaacuuugaucc

SEQ ID NO: 669 - RNA, 18 nt, Artificial Sequence
  Description of Artificial Sequence: Synthetic oligonucleotide
ugucauuccccaaacuuu

SEQ ID NO: 670 - RNA, 18 nt, Artificial Sequence
  Description of Artificial Sequence: Synthetic oligonucleotide
cuaaaugucauuccccaa

SEQ ID NO: 671 - RNA, 18 nt, Artificial Sequence
  Description of Artificial Sequence: Synthetic oligonucleotide
aaaaccuaaaugucauuc

SEQ ID NO: 672 - RNA, 18 nt, Artificial Sequence
  Description of Artificial Sequence: Synthetic oligonucleotide
auucuaaaaccuaaaugu

SEQ ID NO: 673 - RNA, 18 nt, Artificial Sequence
  Description of Artificial Sequence: Synthetic oligonucleotide
uucuaauucuaaaaccua

SEQ ID NO: 674 - RNA, 18 nt, Artificial Sequence
  Description of Artificial Sequence: Synthetic oligonucleotide
ccugguucuaauucuaaa

SEQ ID NO: 675 - RNA, 18 nt, Artificial Sequence
  Description of Artificial Sequence: Synthetic oligonucleotide
cuaugccugguucuaauu

SEQ ID NO: 676 - RNA, 18 nt, Artificial Sequence
  Description of Artificial Sequence: Synthetic oligonucleotide
uauccuuuuaagaauuuu

SEQ ID NO: 677 - RNA, 18 nt, Artificial Sequence
  Description of Artificial Sequence: Synthetic oligonucleotide
gcaacuauccuuuuaaga

SEQ ID NO: 678 - RNA, 18 nt, Artificial Sequence
  Description of Artificial Sequence: Synthetic oligonucleotide
ggguugcaacuauccuuu

SEQ ID NO: 679 - RNA, 18 nt, Artificial Sequence
  Description of Artificial Sequence: Synthetic oligonucleotide
aggcaggguugcaacuau

SEQ ID NO: 680 - RNA, 18 nt, Artificial Sequence
  Description of Artificial Sequence: Synthetic oligonucleotide
cauaaaggcaggguugca

SEQ ID NO: 681 - RNA, 18 nt, Artificial Sequence
  Description of Artificial Sequence: Synthetic oligonucleotide
ggauacauaaaggcaggg

SEQ ID NO: 682 - RNA, 18 nt, Artificial Sequence
  Description of Artificial Sequence: Synthetic oligonucleotide
uaccaggauacauaaagg

SEQ ID NO: 683 - RNA, 18 nt, Artificial Sequence
  Description of Artificial Sequence: Synthetic oligonucleotide
gauaguaccaggauacau

SEQ ID NO: 684 - RNA, 18 nt, Artificial Sequence
  Description of Artificial Sequence: Synthetic oligonucleotide
guaaggauaguaccagga

SEQ ID NO: 685 - RNA, 18 nt, Artificial Sequence
  Description of Artificial Sequence: Synthetic oligonucleotide
acaauguaaggauaguac

SEQ ID NO: 686 - RNA, 18 nt, Artificial Sequence
  Description of Artificial Sequence: Synthetic oligonucleotide
uuguaacaauguaaggau

SEQ ID NO: 687 - RNA, 18 nt, Artificial Sequence
  Description of Artificial Sequence: Synthetic oligonucleotide
cuuuauuguaacaaugua

SEQ ID NO: 688 - RNA, 18 nt, Artificial Sequence
  Description of Artificial Sequence: Synthetic oligonucleotide
uuucucuuuauuguaaca

SEQ ID NO: 689 - RNA, 18 nt, Artificial Sequence
  Description of Artificial Sequence: Synthetic oligonucleotide
uaagauuucucuuuauug

SEQ ID NO: 690 - RNA, 18 nt, Artificial Sequence
  Description of Artificial Sequence: Synthetic oligonucleotide
aaauuuaagauuucucuu

SEQ ID NO: 691 - RNA, 18 nt, Artificial Sequence
  Description of Artificial Sequence: Synthetic oligonucleotide
auugaaaauuuaagauuu

SEQ ID NO: 692 - RNA, 18 nt, Artificial Sequence
  Description of Artificial Sequence: Synthetic oligonucleotide
aagugauugaaaauuuaa

SEQ ID NO: 693 - RNA, 18 nt, Artificial Sequence
  Description of Artificial Sequence: Synthetic oligonucleotide
gaucaaagugauugaaaa

SEQ ID NO: 694 - RNA, 18 nt, Artificial Sequence
  Description of Artificial Sequence: Synthetic oligonucleotide
agggugaucaaagugauu

SEQ ID NO: 695 - RNA, 18 nt, Artificial Sequence
  Description of Artificial Sequence: Synthetic oligonucleotide
ucugcagggugaucaaag

SEQ ID NO: 696 - RNA, 18 nt, Artificial Sequence
  Description of Artificial Sequence: Synthetic oligonucleotide
auuuaucugcagggugau

SEQ ID NO: 697 - RNA, 18 nt, Artificial Sequence
  Description of Artificial Sequence: Synthetic oligonucleotide
cuaaaauuuaucugcagg

SEQ ID NO: 698 - RNA, 18 nt, Artificial Sequence
  Description of Artificial Sequence: Synthetic oligonucleotide
aucugcuaaaauuuaucu

SEQ ID NO: 699 - RNA, 18 nt, Artificial Sequence
  Description of Artificial Sequence: Synthetic oligonucleotide
ggaucaucugcuaaaauu

SEQ ID NO: 700 - RNA, 18 nt, Artificial Sequence
  Description of Artificial Sequence: Synthetic oligonucleotide
ucuaaggaucaucugcua

SEQ ID NO: 701 - RNA, 18 nt, Artificial Sequence
  Description of Artificial Sequence: Synthetic oligonucleotide
uuagaucuaaggaucauc

SEQ ID NO: 702 - RNA, 18 nt, Artificial Sequence
  Description of Artificial Sequence: Synthetic oligonucleotide
acaacuuagaucuaagga

SEQ ID NO: 703 - RNA, 18 nt, Artificial Sequence
  Description of Artificial Sequence: Synthetic oligonucleotide
uaauuacaacuuagaucu

SEQ ID NO: 704 - RNA, 18 nt, Artificial Sequence
  Description of Artificial Sequence: Synthetic oligonucleotide
ccaaauaauuacaacuua

SEQ ID NO: 705 - RNA, 18 nt, Artificial Sequence
  Description of Artificial Sequence: Synthetic oligonucleotide
aucagccaaauaauuaca

SEQ ID NO: 706 - RNA, 18 nt, Artificial Sequence
  Description of Artificial Sequence: Synthetic oligonucleotide
gcucuaucagccaaauaa

SEQ ID NO: 707 - RNA, 18 nt, Artificial Sequence
  Description of Artificial Sequence: Synthetic oligonucleotide
caauagcucuaucagcca

SEQ ID NO: 708 - RNA, 18 nt, Artificial Sequence
  Description of Artificial Sequence: Synthetic oligonucleotide
ugggucaauagcucuauc

SEQ ID NO: 709 - RNA, 18 nt, Artificial Sequence
  Description of Artificial Sequence: Synthetic oligonucleotide
acacaugggucaauagcu

SEQ ID NO: 710 - RNA, 18 nt, Artificial Sequence
  Description of Artificial Sequence: Synthetic oligonucleotide
ugccaacacaugggucaa

SEQ ID NO: 711 - RNA, 18 nt, Artificial Sequence
  Description of Artificial Sequence: Synthetic oligonucleotide
acaaaugccaacacaugg

SEQ ID NO: 712 - RNA, 18 nt, Artificial Sequence
  Description of Artificial Sequence: Synthetic oligonucleotide
gucuuacaaaugccaaca

SEQ ID NO: 713 - RNA, 18 nt, Artificial Sequence
  Description of Artificial Sequence: Synthetic oligonucleotide
agaaagucuuacaaaugc

SEQ ID NO: 714 - RNA, 18 nt, Artificial Sequence
  Description of Artificial Sequence: Synthetic oligonucleotide
uuuuuagaaagucuuaca

SEQ ID NO: 715 - RNA, 18 nt, Artificial Sequence
  Description of Artificial Sequence: Synthetic oligonucleotide
agcacuuuuuagaaaguc

SEQ ID NO: 716 - RNA, 18 nt, Artificial Sequence
  Description of Artificial Sequence: Synthetic oligonucleotide
gcuggagcacuuuuuaga

SEQ ID NO: 717 - RNA, 18 nt, Artificial Sequence
  Description of Artificial Sequence: Synthetic oligonucleotide
aauuugcuggagcacuuu

SEQ ID NO: 718 - RNA, 18 nt, Artificial Sequence
  Description of Artificial Sequence: Synthetic oligonucleotide
auuaaaauuugcuggagc

SEQ ID NO: 719 - RNA, 18 nt, Artificial Sequence
  Description of Artificial Sequence: Synthetic oligonucleotide
gcaguauuaaaauuugcu

SEQ ID NO: 720 - RNA, 18 nt, Artificial Sequence
  Description of Artificial Sequence: Synthetic oligonucleotide
uuaaagcaguauuaaaau

SEQ ID NO: 721 - RNA, 18 nt, Artificial Sequence
  Description of Artificial Sequence: Synthetic oligonucleotide
gauauuuaaagcaguauu

SEQ ID NO: 722 - RNA, 18 nt, Artificial Sequence
  Description of Artificial Sequence: Synthetic oligonucleotide
gucaugauauuuaaagca

SEQ ID NO: 723 - RNA, 18 nt, Artificial Sequence
  Description of Artificial Sequence: Synthetic oligonucleotide
auggugucaugauauuua

SEQ ID NO: 724 - RNA, 18 nt, Artificial Sequence
  Description of Artificial Sequence: Synthetic oligonucleotide
aguucauggugucaugau

SEQ ID NO: 725 - RNA, 18 nt, Artificial Sequence
  Description of Artificial Sequence: Synthetic oligonucleotide
uuuagaguucaugguguc

SEQ ID NO: 726 - RNA, 18 nt, Artificial Sequence
  Description of Artificial Sequence: Synthetic oligonucleotide
aauucuuuagaguucaug

SEQ ID NO: 727 - RNA, 18 nt, Artificial Sequence
  Description of Artificial Sequence: Synthetic oligonucleotide
uuuucaauucuuuagagu

SEQ ID NO: 728 - RNA, 18 nt, Artificial Sequence
  Description of Artificial Sequence: Synthetic oligonucleotide
agcacuuuucaauucuuu

SEQ ID NO: 729 - RNA, 18 nt, Artificial Sequence
  Description of Artificial Sequence: Synthetic oligonucleotide
ucacaagcacuuuucaau

SEQ ID NO: 730 - RNA, 18 nt, Artificial Sequence
  Description of Artificial Sequence: Synthetic oligonucleotide
ccaacucacaagcacuuu

SEQ ID NO: 731 - RNA, 18 nt, Artificial Sequence
  Description of Artificial Sequence: Synthetic oligonucleotide
gauaaccaacucacaagc

SEQ ID NO: 732 - RNA, 18 nt, Artificial Sequence
  Description of Artificial Sequence: Synthetic oligonucleotide
cccuugauaaccaacuca

SEQ ID NO: 733 - RNA, 18 nt, Artificial Sequence
  Description of Artificial Sequence: Synthetic oligonucleotide
uccuccccuugauaacca

SEQ ID NO: 734 - RNA, 18 nt, Artificial Sequence
  Description of Artificial Sequence: Synthetic oligonucleotide
auauauccuccccuugau

SEQ ID NO: 735 - RNA, 18 nt, Artificial Sequence
  Description of Artificial Sequence: Synthetic oligonucleotide
auuugauauauccucccc

SEQ ID NO: 736 - RNA, 18 nt, Artificial Sequence
  Description of Artificial Sequence: Synthetic oligonucleotide
uggccauuugauauaucc

SEQ ID NO: 737 - RNA, 18 nt, Artificial Sequence
  Description of Artificial Sequence: Synthetic oligonucleotide
caaaauggccauuugaua

SEQ ID NO: 738 - RNA, 18 nt, Artificial Sequence
  Description of Artificial Sequence: Synthetic oligonucleotide
uugaacaaaauggccauu

SEQ ID NO: 739 - RNA, 18 nt, Artificial Sequence
  Description of Artificial Sequence: Synthetic oligonucleotide
acauauugaacaaaaugg

SEQ ID NO: 740 - RNA, 18 nt, Artificial Sequence
  Description of Artificial Sequence: Synthetic oligonucleotide
agaacacauauugaacaa

SEQ ID NO: 741 - RNA, 18 nt, Artificial Sequence
  Description of Artificial Sequence: Synthetic oligonucleotide
uuucuagaacacauauug

SEQ ID NO: 742 - RNA, 18 nt, Artificial Sequence
  Description of Artificial Sequence: Synthetic oligonucleotide
uuucauuucuagaacaca

SEQ ID NO: 743 - RNA, 18 nt, Artificial Sequence
  Description of Artificial Sequence: Synthetic oligonucleotide
uggcuuuucauuucuaga

SEQ ID NO: 744 - RNA, 18 nt, Artificial Sequence
  Description of Artificial Sequence: Synthetic oligonucleotide
uaguauggcuuuucauuu

SEQ ID NO: 745 - RNA, 18 nt, Artificial Sequence
  Description of Artificial Sequence: Synthetic oligonucleotide
uauuuuaguauggcuuuu

SEQ ID NO: 746 - RNA, 18 nt, Artificial Sequence
  Description of Artificial Sequence: Synthetic oligonucleotide
gacaguauuuuaguaugg

SEQ ID NO: 747 - RNA, 18 nt, Artificial Sequence
  Description of Artificial Sequence: Synthetic oligonucleotide
accaagacaguauuuuag

SEQ ID NO: 748 - RNA, 18 nt, Artificial Sequence
  Description of Artificial Sequence: Synthetic oligonucleotide
uuuggaccaagacaguau

SEQ ID NO: 749 - RNA, 18 nt, Artificial Sequence
  Description of Artificial Sequence: Synthetic oligonucleotide
cagauuuuggaccaagac

SEQ ID NO: 750 - RNA, 18 nt, Artificial Sequence
  Description of Artificial Sequence: Synthetic oligonucleotide
uuacacagauuuuggacc

SEQ ID NO: 751 - RNA, 18 nt, Artificial Sequence
  Description of Artificial Sequence: Synthetic oligonucleotide
aaauuuuacacagauuuu

SEQ ID NO: 752 - RNA, 18 nt, Artificial Sequence
  Description of Artificial Sequence: Synthetic oligonucleotide
aaaacaaauuuuacacag

SEQ ID NO: 753 - RNA, 18 nt, Artificial Sequence
  Description of Artificial Sequence: Synthetic oligonucleotide
auuucaaaacaaauuuua

SEQ ID NO: 754 - RNA, 18 nt, Artificial Sequence
  Description of Artificial Sequence: Synthetic oligonucleotide
aagacauuucaaaacaaa

SEQ ID NO: 755 - RNA, 18 nt, Artificial Sequence
  Description of Artificial Sequence: Synthetic oligonucleotide
uuugaaagacauuucaaa

SEQ ID NO: 756 - RNA, 18 nt, Artificial Sequence
  Description of Artificial Sequence: Synthetic oligonucleotide
auauuuuugaaagacauu

SEQ ID NO: 757 - RNA, 18 nt, Artificial Sequence
  Description of Artificial Sequence: Synthetic oligonucleotide
agggaauauuuuugaaag

SEQ ID NO: 758 - RNA, 18 nt, Artificial Sequence
  Description of Artificial Sequence: Synthetic oligonucleotide
ucaaaagggaauauuuuu

SEQ ID NO: 759 - RNA, 18 nt, Artificial Sequence
  Description of Artificial Sequence: Synthetic oligonucleotide
aauuuucaaaagggaaua

SEQ ID NO: 760 - RNA, 18 nt, Artificial Sequence
  Description of Artificial Sequence: Synthetic oligonucleotide
gauauaauuuucaaaagg

SEQ ID NO: 761 - RNA, 18 nt, Artificial Sequence
  Description of Artificial Sequence: Synthetic oligonucleotide
uuacugauauaauuuuca

SEQ ID NO: 762 - RNA, 18 nt, Artificial Sequence
  Description of Artificial Sequence: Synthetic oligonucleotide
uauucuuacugauauaau

SEQ ID NO: 763 - RNA, 18 nt, Artificial Sequence
  Description of Artificial Sequence: Synthetic oligonucleotide
auaaauauucuuacugau

SEQ ID NO: 764 - RNA, 18 nt, Artificial Sequence
  Description of Artificial Sequence: Synthetic oligonucleotide
guuuaauaaauauucuua

SEQ ID NO: 765 - RNA, 18 nt, Artificial Sequence
  Description of Artificial Sequence: Synthetic oligonucleotide
cugauguuuaauaaauau

SEQ ID NO: 766 - RNA, 18 nt, Artificial Sequence
  Description of Artificial Sequence: Synthetic oligonucleotide
uagaccugauguuuaaua

SEQ ID NO: 767 - RNA, 18 nt, Artificial Sequence
  Description of Artificial Sequence: Synthetic oligonucleotide
uaauuuagaccugauguu

SEQ ID NO: 768 - RNA, 18 nt, Artificial Sequence
  Description of Artificial Sequence: Synthetic oligonucleotide
aaaaauaauuuagaccug

SEQ ID NO: 769 - RNA, 18 nt, Artificial Sequence
  Description of Artificial Sequence: Synthetic oligonucleotide
ggaguaaaaauaauuuag

SEQ ID NO: 770 - RNA, 18 nt, Artificial Sequence
  Description of Artificial Sequence: Synthetic oligonucleotide
acuuuggaguaaaaauaa

SEQ ID NO: 771 - RNA, 18 nt, Artificial Sequence
  Description of Artificial Sequence: Synthetic oligonucleotide
guuuuacuuuggaguaaa

SEQ ID NO: 772 - RNA, 18 nt, Artificial Sequence
  Description of Artificial Sequence: Synthetic oligonucleotide
ugcauguuuuacuuugga

SEQ ID NO: 773 - RNA, 18 nt, Artificial Sequence
  Description of Artificial Sequence: Synthetic oligonucleotide
uccauccuuugaaugugg

SEQ ID NO: 774 - RNA, 18 nt, Artificial Sequence
  Description of Artificial Sequence: Synthetic oligonucleotide
auccauccauccuuugaa

SEQ ID NO: 775 - RNA, 18 nt, Artificial Sequence
  Description of Artificial Sequence: Synthetic oligonucleotide
auuauauccauccauccu

SEQ ID NO: 776 - RNA, 18 nt, Artificial Sequence
  Description of Artificial Sequence: Synthetic oligonucleotide
cauacauuauauccaucc

SEQ ID NO: 777 - RNA, 18 nt, Artificial Sequence
  Description of Artificial Sequence: Synthetic oligonucleotide
ugcugcauacauuauauc

SEQ ID NO: 778 - RNA, 18 nt, Artificial Sequence
  Description of Artificial Sequence: Synthetic oligonucleotide
ucaacugcugcauacauu

SEQ ID NO: 779 - RNA, 18 nt, Artificial Sequence
  Description of Artificial Sequence: Synthetic oligonucleotide
uggaaucaacugcugcau

SEQ ID NO: 780 - RNA, 18 nt, Artificial Sequence
  Description of Artificial Sequence: Synthetic oligonucleotide
auuucuggaaucaacugc

SEQ ID NO: 781 - RNA, 18 nt, Artificial Sequence
  Description of Artificial Sequence: Synthetic oligonucleotide
aaagggcauucacaacca

SEQ ID NO: 782 - RNA, 18 nt, Artificial Sequence
  Description of Artificial Sequence: Synthetic oligonucleotide
uccuaaaagggcauucac

SEQ ID NO: 783 - RNA, 18 nt, Artificial Sequence
  Description of Artificial Sequence: Synthetic oligonucleotide
auugcuccuaaaagggca

SEQ ID NO: 784 - RNA, 18 nt, Artificial Sequence
  Description of Artificial Sequence: Synthetic oligonucleotide
auggaauugcuccuaaaa

SEQ ID NO: 785 - RNA, 18 nt, Artificial Sequence
  Description of Artificial Sequence: Synthetic oligonucleotide
gauggauggaauugcucc

SEQ ID NO: 786 - RNA, 18 nt, Artificial Sequence
  Description of Artificial Sequence: Synthetic oligonucleotide
uucaugauggauggaauu

SEQ ID NO: 787 - RNA, 18 nt, Artificial Sequence
  Description of Artificial Sequence: Synthetic oligonucleotide
gcacauucaugauggaug

SEQ ID NO: 788 - RNA, 18 nt, Artificial Sequence
  Description of Artificial Sequence: Synthetic oligonucleotide
cagaagcacauucaugau

SEQ ID NO: 789 - RNA, 18 nt, Artificial Sequence
  Description of Artificial Sequence: Synthetic oligonucleotide
caaaccagaagcacauuc

SEQ ID NO: 790 - RNA, 18 nt, Artificial Sequence
  Description of Artificial Sequence: Synthetic oligonucleotide
uaagacaaaccagaagca

SEQ ID NO: 791 - RNA, 18 nt, Artificial Sequence
  Description of Artificial Sequence: Synthetic oligonucleotide
gaauauaagacaaaccag

SEQ ID NO: 792 - RNA, 18 nt, Artificial Sequence
  Description of Artificial Sequence: Synthetic oligonucleotide
agccagaauauaagacaa

SEQ ID NO: 793 - RNA, 18 nt, Artificial Sequence
  Description of Artificial Sequence: Synthetic oligonucleotide
aaauuagccagaauauaa

SEQ ID NO: 794 - RNA, 18 nt, Artificial Sequence
  Description of Artificial Sequence: Synthetic oligonucleotide
gcugaaaauuagccagaa

SEQ ID NO: 795 - RNA, 18 nt, Artificial Sequence
  Description of Artificial Sequence: Synthetic oligonucleotide
augaugcugaaaauuagc

SEQ ID NO: 796 - RNA, 18 nt, Artificial Sequence
  Description of Artificial Sequence: Synthetic oligonucleotide
cgcccaugaugcugaaaa

SEQ ID NO: 797 - RNA, 18 nt, Artificial Sequence
  Description of Artificial Sequence: Synthetic oligonucleotide
auuuacgcccaugaugcu

SEQ ID NO: 798 - RNA, 18 nt, Artificial Sequence
  Description of Artificial Sequence: Synthetic oligonucleotide
aacaaauuuacgcccaug

SEQ ID NO: 799 - RNA, 18 nt, Artificial Sequence
  Description of Artificial Sequence: Synthetic oligonucleotide
cagcaaacaaauuuacgc

SEQ ID NO: 800 - RNA, 18 nt, Artificial Sequence
  Description of Artificial Sequence: Synthetic oligonucleotide
uuugccagcaaacaaauu

SEQ ID NO: 801 - RNA, 18 nt, Artificial Sequence
  Description of Artificial Sequence: Synthetic oligonucleotide
uagaauuugccagcaaac

SEQ ID NO: 802 - RNA, 18 nt, Artificial Sequence
  Description of Artificial Sequence: Synthetic oligonucleotide
agugguagaauuugccag

SEQ ID NO: 803 - RNA, 18 nt, Artificial Sequence
  Description of Artificial Sequence: Synthetic oligonucleotide
aauacagugguagaauuu

SEQ ID NO: 804 - RNA, 18 nt, Artificial Sequence
  Description of Artificial Sequence: Synthetic oligonucleotide
guguuaauacagugguag

SEQ ID NO: 805 - RNA, 18 nt, Artificial Sequence
  Description of Artificial Sequence: Synthetic oligonucleotide
uugugguguuaauacagu

SEQ ID NO: 806 - RNA, 18 nt, Artificial Sequence
  Description of Artificial Sequence: Synthetic oligonucleotide
accaguugugguguuaau

SEQ ID NO: 807 - RNA, 18 nt, Artificial Sequence
  Description of Artificial Sequence: Synthetic oligonucleotide
cugucaccaguuguggug

SEQ ID NO: 808 - RNA, 18 nt, Artificial Sequence
  Description of Artificial Sequence: Synthetic oligonucleotide
caaaccugucaccaguug

SEQ ID NO: 809 - RNA, 18 nt, Artificial Sequence
  Description of Artificial Sequence: Synthetic oligonucleotide
gaugucaaaccugucacc

SEQ ID NO: 810 - RNA, 18 nt, Artificial Sequence
  Description of Artificial Sequence: Synthetic oligonucleotide
ucuucgaugucaaaccug

SEQ ID NO: 811 - RNA, 18 nt, Artificial Sequence
  Description of Artificial Sequence: Synthetic oligonucleotide
ucacgucuucgaugucaa

SEQ ID NO: 812 - RNA, 18 nt, Artificial Sequence
  Description of Artificial Sequence: Synthetic oligonucleotide
auuauucacgucuucgau

SEQ ID NO: 813 - RNA, 18 nt, Artificial Sequence
  Description of Artificial Sequence: Synthetic oligonucleotide
guaugauuauucacgucu

SEQ ID NO: 814 - RNA, 18 nt, Artificial Sequence
  Description of Artificial Sequence: Synthetic oligonucleotide
aaucaguaugauuauuca

SEQ ID NO: 815 - RNA, 18 nt, Artificial Sequence
  Description of Artificial Sequence: Synthetic oligonucleotide
uaggcaaucaguaugauu

SEQ ID NO: 816 - RNA, 18 nt, Artificial Sequence
  Description of Artificial Sequence: Synthetic oligonucleotide
aguuuuaggcaaucagua

SEQ ID NO: 817 - RNA, 18 nt, Artificial Sequence
  Description of Artificial Sequence: Synthetic oligonucleotide
cuauuaguuuuaggcaau

SEQ ID NO: 818 - RNA, 18 nt, Artificial Sequence
  Description of Artificial Sequence: Synthetic oligonucleotide
ucuuucuauuaguuuuag

SEQ ID NO: 819 - RNA, 18 nt, Artificial Sequence
  Description of Artificial Sequence: Synthetic oligonucleotide
ucauuucuuucuauuagu

SEQ ID NO: 820 - RNA, 18 nt, Artificial Sequence
  Description of Artificial Sequence: Synthetic oligonucleotide
cagucucauuucuuucua

SEQ ID NO: 821 - RNA, 18 nt, Artificial Sequence
  Description of Artificial Sequence: Synthetic oligonucleotide
ucgagcagucucauuucu

SEQ ID NO: 822 - RNA, 18 nt, Artificial Sequence
  Description of Artificial Sequence: Synthetic oligonucleotide
uuccaucgagcagucuca

SEQ ID NO: 823 - RNA, 18 nt, Artificial Sequence
  Description of Artificial Sequence: Synthetic oligonucleotide
cauuuuuccaucgagcag

SEQ ID NO: 824 - RNA, 18 nt, Artificial Sequence
  Description of Artificial Sequence: Synthetic oligonucleotide
uuucacauuuuuccaucg

SEQ ID NO: 825 - RNA, 18 nt, Artificial Sequence
  Description of Artificial Sequence: Synthetic oligonucleotide
uuuacuuucacauuuuuc

SEQ ID NO: 826 - RNA, 18 nt, Artificial Sequence
  Description of Artificial Sequence: Synthetic oligonucleotide
caaaguuuacuuucacau

SEQ ID NO: 827 - RNA, 18 nt, Artificial Sequence
  Description of Artificial Sequence: Synthetic oligonucleotide
auuaucaaaguuuacuuu

SEQ ID NO: 828 - RNA, 18 nt, Artificial Sequence
  Description of Artificial Sequence: Synthetic oligonucleotide
ccuacauuaucaaaguuu

SEQ ID NO: 829 - RNA, 18 nt, Artificial Sequence
  Description of Artificial Sequence: Synthetic oligonucleotide
caaauccuacauuaucaa

SEQ ID NO: 830 - RNA, 18 nt, Artificial Sequence
  Description of Artificial Sequence: Synthetic oligonucleotide
auacccaaauccuacauu

SEQ ID NO: 831 - RNA, 18 nt, Artificial Sequence
  Description of Artificial Sequence: Synthetic oligonucleotide
gagagauacccaaauccu

SEQ ID NO: 832 - RNA, 18 nt, Artificial Sequence
  Description of Artificial Sequence: Synthetic oligonucleotide
gcaaagagagauacccaa

SEQ ID NO: 833 - RNA, 18 nt, Artificial Sequence
  Description of Artificial Sequence: Synthetic oligonucleotide
uugaagcaaagagagaua

SEQ ID NO: 834 - RNA, 18 nt, Artificial Sequence
  Description of Artificial Sequence: Synthetic oligonucleotide
cagagaaaauaguguuca

SEQ ID NO: 835 - RNA, 18 nt, Artificial Sequence
  Description of Artificial Sequence: Synthetic oligonucleotide
auauucagagaaaauagu

SEQ ID NO: 836 - RNA, 18 nt, Artificial Sequence
  Description of Artificial Sequence: Synthetic oligonucleotide
uaaaaauauucagagaaa

SEQ ID NO: 837 - RNA, 18 nt, Artificial Sequence
  Description of Artificial Sequence: Synthetic oligonucleotide
aacaauaaaaauauucag

SEQ ID NO: 838 - RNA, 18 nt, Artificial Sequence
  Description of Artificial Sequence: Synthetic oligonucleotide
uuccaaacaauaaaaaua

SEQ ID NO: 839 - RNA, 18 nt, Artificial Sequence
  Description of Artificial Sequence: Synthetic oligonucleotide
uauuauuccaaacaauaa

SEQ ID NO: 840 - RNA, 18 nt, Artificial Sequence
  Description of Artificial Sequence: Synthetic oligonucleotide
uuuguuauuauuccaaac

SEQ ID NO: 841 - RNA, 18 nt, Artificial Sequence
  Description of Artificial Sequence: Synthetic oligonucleotide
auuauuuuguuauuauuc

SEQ ID NO: 842 - RNA, 18 nt, Artificial Sequence
  Description of Artificial Sequence: Synthetic oligonucleotide
augucauuauuuuguuau

SEQ ID NO: 843 - RNA, 18 nt, Artificial Sequence
  Description of Artificial Sequence: Synthetic oligonucleotide
gauguaugucauuauuuu

SEQ ID NO: 844 - RNA, 18 nt, Artificial Sequence
  Description of Artificial Sequence: Synthetic oligonucleotide
uaauagauguaugucauu

SEQ ID NO: 845 - RNA, 18 nt, Artificial Sequence
  Description of Artificial Sequence: Synthetic oligonucleotide
cuaaauaauagauguaug

SEQ ID NO: 846 - RNA, 18 nt, Artificial Sequence
  Description of Artificial Sequence: Synthetic oligonucleotide
aggaacuaaauaauagau

SEQ ID NO: 847 - RNA, 18 nt, Artificial Sequence
  Description of Artificial Sequence: Synthetic oligonucleotide
uucuuaggaacuaaauaa

SEQ ID NO: 848 - RNA, 18 nt, Artificial Sequence
  Description of Artificial Sequence: Synthetic oligonucleotide
acuuuuucuuaggaacua

SEQ ID NO: 849 - RNA, 18 nt, Artificial Sequence
  Description of Artificial Sequence: Synthetic oligonucleotide
uauauacuuuuucuuagg

SEQ ID NO: 850 - RNA, 18 nt, Artificial Sequence
  Description of Artificial Sequence: Synthetic oligonucleotide
agaaauauauacuuuuuc

SEQ ID NO: 851 - RNA, 18 nt, Artificial Sequence
  Description of Artificial Sequence: Synthetic oligonucleotide
uagaaagaaauauauacu

SEQ ID NO: 852 - RNA, 18 nt, Artificial Sequence
  Description of Artificial Sequence: Synthetic oligonucleotide
uuaaauagaaagaaauau

SEQ ID NO: 853 - RNA, 18 nt, Artificial Sequence
  Description of Artificial Sequence: Synthetic oligonucleotide
auuuuuuaaauagaaaga

SEQ ID NO: 854 - RNA, 18 nt, Artificial Sequence
  Description of Artificial Sequence: Synthetic oligonucleotide
uugaaauuuuuuaaauag

SEQ ID NO: 855 - RNA, 18 nt, Artificial Sequence
  Description of Artificial Sequence: Synthetic oligonucleotide
acaaauugaaauuuuuua

SEQ ID NO: 856 - RNA, 18 nt, Artificial Sequence
  Description of Artificial Sequence: Synthetic oligonucleotide
uacuaacaaauugaaauu

SEQ ID NO: 857 - RNA, 18 nt, Artificial Sequence
  Description of Artificial Sequence: Synthetic oligonucleotide
acuuguacuaacaaauug

SEQ ID NO: 858 - RNA, 18 nt, Artificial Sequence
  Description of Artificial Sequence: Synthetic oligonucleotide
cauaaacuuguacuaaca

SEQ ID NO: 859 - RNA, 18 nt, Artificial Sequence
  Description of Artificial Sequence: Synthetic oligonucleotide
gggcucauaaacuuguac

SEQ ID NO: 860 - RNA, 18 nt, Artificial Sequence
  Description of Artificial Sequence: Synthetic oligonucleotide
caucugggcucauaaacu

SEQ ID NO: 861 - RNA, 18 nt, Artificial Sequence
  Description of Artificial Sequence: Synthetic oligonucleotide
ucacccaucugggcucau

SEQ ID NO: 862 - RNA, 18 nt, Artificial Sequence
  Description of Artificial Sequence: Synthetic oligonucleotide
aguuuucacccaucuggg

SEQ ID NO: 863 - RNA, 18 nt, Artificial Sequence
  Description of Artificial Sequence: Synthetic oligonucleotide
aauaaaguuuucacccau

SEQ ID NO: 864 - RNA, 18 nt, Artificial Sequence
  Description of Artificial Sequence: Synthetic oligonucleotide
cauguaauaaaguuuuca

SEQ ID NO: 865 - RNA, 18 nt, Artificial Sequence
  Description of Artificial Sequence: Synthetic oligonucleotide
ccuuacauguaauaaagu

SEQ ID NO: 866 - RNA, 18 nt, Artificial Sequence
  Description of Artificial Sequence: Synthetic oligonucleotide
gcaguccuuacauguaau

SEQ ID NO: 867 - RNA, 18 nt, Artificial Sequence
  Description of Artificial Sequence: Synthetic oligonucleotide
uaucugcaguccuuacau

SEQ ID NO: 868 - RNA, 18 nt, Artificial Sequence
  Description of Artificial Sequence: Synthetic oligonucleotide
gacuauaucugcaguccu

SEQ ID NO: 869 - RNA, 18 nt, Artificial Sequence
  Description of Artificial Sequence: Synthetic oligonucleotide
cuacugacuauaucugca

SEQ ID NO: 870 - RNA, 18 nt, Artificial Sequence
  Description of Artificial Sequence: Synthetic oligonucleotide
ggucacuacugacuauau

SEQ ID NO: 871 - RNA, 18 nt, Artificial Sequence
  Description of Artificial Sequence: Synthetic oligonucleotide
ggucuggucacuacugac

SEQ ID NO: 872 - RNA, 18 nt, Artificial Sequence
  Description of Artificial Sequence: Synthetic oligonucleotide
uguuuggucuggucacua

SEQ ID NO: 873 - RNA, 18 nt, Artificial Sequence
  Description of Artificial Sequence: Synthetic oligonucleotide
gucuuuguuuggucuggu

SEQ ID NO: 874 - RNA, 18 nt, Artificial Sequence
  Description of Artificial Sequence: Synthetic oligonucleotide
aagaggucuuuguuuggu

SEQ ID NO: 875 - RNA, 18 nt, Artificial Sequence
  Description of Artificial Sequence: Synthetic oligonucleotide
agacaaagaggucuuugu

SEQ ID NO: 876 - RNA, 18 nt, Artificial Sequence
  Description of Artificial Sequence: Synthetic oligonucleotide
aaaaaagacaaagagguc

SEQ ID NO: 877 - RNA, 18 nt, Artificial Sequence
  Description of Artificial Sequence: Synthetic oligonucleotide
acaagaaaaaagacaaag

SEQ ID NO: 878 - RNA, 18 nt, Artificial Sequence
  Description of Artificial Sequence: Synthetic oligonucleotide
aaaauacaagaaaaaaga

SEQ ID NO: 879 - RNA, 18 nt, Artificial Sequence
  Description of Artificial Sequence: Synthetic oligonucleotide
caaagaaaauacaagaaa

SEQ ID NO: 880 - RNA, 18 nt, Artificial Sequence
  Description of Artificial Sequence: Synthetic oligonucleotide
agaaacaaagaaaauaca

SEQ ID NO: 881 - RNA, 18 nt, Artificial Sequence
  Description of Artificial Sequence: Synthetic oligonucleotide
aauauagaaacaaagaaa

SEQ ID NO: 882 - RNA, 18 nt, Artificial Sequence
  Description of Artificial Sequence: Synthetic oligonucleotide
agagcaauauagaaacaa

SEQ ID NO: 883 - RNA, 18 nt, Artificial Sequence
  Description of Artificial Sequence: Synthetic oligonucleotide
uagaaagagcaauauaga

SEQ ID NO: 884 - RNA, 18 nt, Artificial Sequence
  Description of Artificial Sequence: Synthetic oligonucleotide
uuauauagaaagagcaau

SEQ ID NO: 885 - RNA, 18 nt, Artificial Sequence
  Description of Artificial Sequence: Synthetic oligonucleotide
cuuguuuauauagaaaga

SEQ ID NO: 886 - RNA, 18 nt, Artificial Sequence
  Description of Artificial Sequence: Synthetic oligonucleotide
auuuacuuguuuauauag

SEQ ID NO: 887 - RNA, 18 nt, Artificial Sequence
  Description of Artificial Sequence: Synthetic oligonucleotide
uauuaauuuacuuguuua

SEQ ID NO: 888 - RNA, 18 nt, Artificial Sequence
  Description of Artificial Sequence: Synthetic oligonucleotide
ugauuuauuaauuuacuu

SEQ ID NO: 889 - RNA, 18 nt, Artificial Sequence
  Description of Artificial Sequence: Synthetic oligonucleotide
guuacugauuuauuaauu

SEQ ID NO: 890 - RNA, 18 nt, Artificial Sequence
  Description of Artificial Sequence: Synthetic oligonucleotide
gcaaaguuacugauuuau

SEQ ID NO: 891 - RNA, 18 nt, Artificial Sequence
  Description of Artificial Sequence: Synthetic oligonucleotide
aaauggcaaaguuacuga

SEQ ID NO: 892 - RNA, 18 nt, Artificial Sequence
  Description of Artificial Sequence: Synthetic oligonucleotide
auaaaaaauggcaaaguu

SEQ ID NO: 893 - RNA, 18 nt, Artificial Sequence
  Description of Artificial Sequence: Synthetic oligonucleotide
ucacaauaaaaaauggca

SEQ ID NO: 894 - RNA, 18 nt, Artificial Sequence
  Description of Artificial Sequence: Synthetic oligonucleotide
ucuaaucacaauaaaaaa

SEQ ID NO: 895 - RNA, 18 nt, Artificial Sequence
  Description of Artificial Sequence: Synthetic oligonucleotide
agccuucuaaucacaaua

SEQ ID NO: 896 - RNA, 18 nt, Artificial Sequence
  Description of Artificial Sequence: Synthetic oligonucleotide
aaacaagccuucuaauca

SEQ ID NO: 897 - RNA, 18 nt, Artificial Sequence
  Description of Artificial Sequence: Synthetic oligonucleotide
cagggaaacaagccuucu

SEQ ID NO: 898 - RNA, 18 nt, Artificial Sequence
  Description of Artificial Sequence: Synthetic oligonucleotide
cugaucagggaaacaagc

SEQ ID NO: 899 - RNA, 18 nt, Artificial Sequence
  Description of Artificial Sequence: Synthetic oligonucleotide
gguagcugaucagggaaa

SEQ ID NO: 900 - RNA, 18 nt, Artificial Sequence
  Description of Artificial Sequence: Synthetic oligonucleotide
guuuugguagcugaucag

SEQ ID NO: 901 - RNA, 18 nt, Artificial Sequence
  Description of Artificial Sequence: Synthetic oligonucleotide
auuccguuuugguagcug

SEQ ID NO: 902 - RNA, 18 nt, Artificial Sequence
  Description of Artificial Sequence: Synthetic oligonucleotide
aguguauuccguuuuggu

SEQ ID NO: 903 - RNA, 18 nt, Artificial Sequence
  Description of Artificial Sequence: Synthetic oligonucleotide
uguuaaguguauuccguu

SEQ ID NO: 904 - RNA, 18 nt, Artificial Sequence
  Description of Artificial Sequence: Synthetic oligonucleotide
cuaucuguuaaguguauu

SEQ ID NO: 905 - RNA, 18 nt, Artificial Sequence
  Description of Artificial Sequence: Synthetic oligonucleotide
augaucuaucuguuaagu

SEQ ID NO: 906 - RNA, 18 nt, Artificial Sequence
  Description of Artificial Sequence: Synthetic oligonucleotide
ggaagaugaucuaucugu

SEQ ID NO: 907 - RNA, 18 nt, Artificial Sequence
  Description of Artificial Sequence: Synthetic oligonucleotide
guuuuggaagaugaucua

SEQ ID NO: 908 - RNA, 18 nt, Artificial Sequence
  Description of Artificial Sequence: Synthetic oligonucleotide
uauguguuuuggaagaug

SEQ ID NO: 909 - RNA, 18 nt, Artificial Sequence
  Description of Artificial Sequence: Synthetic oligonucleotide
aaguguauguguuuugga

SEQ ID NO: 910 - RNA, 18 nt, Artificial Sequence
  Description of Artificial Sequence: Synthetic oligonucleotide
guauuaaguguauguguu

SEQ ID NO: 911 - RNA, 18 nt, Artificial Sequence
  Description of Artificial Sequence: Synthetic oligonucleotide
uagguguauuaaguguau

SEQ ID NO: 912 - RNA, 18 nt, Artificial Sequence
  Description of Artificial Sequence: Synthetic oligonucleotide
ccaauuagguguauuaag

SEQ ID NO: 913 - RNA, 18 nt, Artificial Sequence
  Description of Artificial Sequence: Synthetic oligonucleotide
acaauccaauuaggugua

SEQ ID NO: 914 - RNA, 18 nt, Artificial Sequence
  Description of Artificial Sequence: Synthetic oligonucleotide
uaauuacaauccaauuag

SEQ ID NO: 915 - RNA, 18 nt, Artificial Sequence
  Description of Artificial Sequence: Synthetic oligonucleotide
ccaauuaauuacaaucca

SEQ ID NO: 916 - RNA, 18 nt, Artificial Sequence
  Description of Artificial Sequence: Synthetic oligonucleotide
cccuaccaauuaauuaca

SEQ ID NO: 917 - RNA, 18 nt, Artificial Sequence
  Description of Artificial Sequence: Synthetic oligonucleotide
uuaaucccuaccaauuaa

SEQ ID NO: 918 - RNA, 18 nt, Artificial Sequence
  Description of Artificial Sequence: Synthetic oligonucleotide
agcaguuaaucccuacca

SEQ ID NO: 919 - RNA, 18 nt, Artificial Sequence
  Description of Artificial Sequence: Synthetic oligonucleotide
ucagcagcaguuaauccc

SEQ ID NO: 920 - RNA, 18 nt, Artificial Sequence
  Description of Artificial Sequence: Synthetic oligonucleotide
agaacucagcagcaguua

SEQ ID NO: 921 - RNA, 18 nt, Artificial Sequence
  Description of Artificial Sequence: Synthetic oligonucleotide
auaauagaacucagcagc

SEQ ID NO: 922 - RNA, 18 nt, Artificial Sequence
  Description of Artificial Sequence: Synthetic oligonucleotide
uccaaauaauagaacuca

SEQ ID NO: 923 - RNA, 18 nt, Artificial Sequence
  Description of Artificial Sequence: Synthetic oligonucleotide
uuugauccaaauaauaga

SEQ ID NO: 924 - RNA, 18 nt, Artificial Sequence
  Description of Artificial Sequence: Synthetic oligonucleotide
caaacuuugauccaaaua

SEQ ID NO: 925 - RNA, 18 nt, Artificial Sequence
  Description of Artificial Sequence: Synthetic oligonucleotide
uuccccaaacuuugaucc

SEQ ID NO: 926 - RNA, 18 nt, Artificial Sequence
  Description of Artificial Sequence: Synthetic oligonucleotide
ugucauuccccaaacuuu

SEQ ID NO: 927 - RNA, 18 nt, Artificial Sequence
  Description of Artificial Sequence: Synthetic oligonucleotide
cuaaaugucauuccccaa

SEQ ID NO: 928 - RNA, 18 nt, Artificial Sequence
  Description of Artificial Sequence: Synthetic oligonucleotide
aaaaccuaaaugucauuc

SEQ ID NO: 929 - RNA, 18 nt, Artificial Sequence
  Description of Artificial Sequence: Synthetic oligonucleotide
auucuaaaaccuaaaugu

SEQ ID NO: 930 - RNA, 18 nt, Artificial Sequence
  Description of Artificial Sequence: Synthetic oligonucleotide
uucuaauucuaaaaccua

SEQ ID NO: 931 - RNA, 18 nt, Artificial Sequence
  Description of Artificial Sequence: Synthetic oligonucleotide
ccugguucuaauucuaaa

SEQ ID NO: 932 - RNA, 18 nt, Artificial Sequence
  Description of Artificial Sequence: Synthetic oligonucleotide
cuaugccugguucuaauu

SEQ ID NO: 933 - RNA, 18 nt, Artificial Sequence
  Description of Artificial Sequence: Synthetic oligonucleotide
uauccuuuuaagaauuuu

SEQ ID NO: 934 - RNA, 18 nt, Artificial Sequence
  Description of Artificial Sequence: Synthetic oligonucleotide
gcaacuauccuuuuaaga

SEQ ID NO: 935 - RNA, 18 nt, Artificial Sequence
  Description of Artificial Sequence: Synthetic oligonucleotide
ggguugcaacuauccuuu

SEQ ID NO: 936 - RNA, 18 nt, Artificial Sequence
  Description of Artificial Sequence: Synthetic oligonucleotide
aggcaggguugcaacuau

SEQ ID NO: 937 - RNA, 18 nt, Artificial Sequence
  Description of Artificial Sequence: Synthetic oligonucleotide
cauaaaggcaggguugca

SEQ ID NO: 938 - RNA, 18 nt, Artificial Sequence
  Description of Artificial Sequence: Synthetic oligonucleotide
ggauacauaaaggcaggg

SEQ ID NO: 939 - RNA, 18 nt, Artificial Sequence
  Description of Artificial Sequence: Synthetic oligonucleotide
uaccaggauacauaaagg

SEQ ID NO: 940 - RNA, 18 nt, Artificial Sequence
  Description of Artificial Sequence: Synthetic oligonucleotide
gauaguaccaggauacau

SEQ ID NO: 941 - RNA, 18 nt, Artificial Sequence
  Description of Artificial Sequence: Synthetic oligonucleotide
guaaggauaguaccagga

SEQ ID NO: 942 - RNA, 18 nt, Artificial Sequence
  Description of Artificial Sequence: Synthetic oligonucleotide
acaauguaaggauaguac

SEQ ID NO: 943 - RNA, 18 nt, Artificial Sequence
  Description of Artificial Sequence: Synthetic oligonucleotide
uuguaacaauguaaggau

SEQ ID NO: 944 - RNA, 18 nt, Artificial Sequence
  Description of Artificial Sequence: Synthetic oligonucleotide
cuuuauuguaacaaugua

SEQ ID NO: 945 - RNA, 18 nt, Artificial Sequence
  Description of Artificial Sequence: Synthetic oligonucleotide
uuucucuuuauuguaaca

SEQ ID NO: 946 - RNA, 18 nt, Artificial Sequence
  Description of Artificial Sequence: Synthetic oligonucleotide
uaagauuucucuuuauug

SEQ ID NO: 947 - RNA, 18 nt, Artificial Sequence
  Description of Artificial Sequence: Synthetic oligonucleotide
aaauuuaagauuucucuu

SEQ ID NO: 948 - RNA, 18 nt, Artificial Sequence
  Description of Artificial Sequence: Synthetic oligonucleotide
auugaaaauuuaagauuu

SEQ ID NO: 949 - RNA, 18 nt, Artificial Sequence
  Description of Artificial Sequence: Synthetic oligonucleotide
aagugauugaaaauuuaa

SEQ ID NO: 950 - RNA, 18 nt, Artificial Sequence
  Description of Artificial Sequence: Synthetic oligonucleotide
gaucaaagugauugaaaa

SEQ ID NO: 951 - RNA, 18 nt, Artificial Sequence
  Description of Artificial Sequence: Synthetic oligonucleotide
agggugaucaaagugauu

SEQ ID NO: 952 - RNA, 18 nt, Artificial Sequence
  Description of Artificial Sequence: Synthetic oligonucleotide
ucugcagggugaucaaag

SEQ ID NO: 953 - RNA, 18 nt, Artificial Sequence
  Description of Artificial Sequence: Synthetic oligonucleotide
auuuaucugcagggugau

SEQ ID NO: 954 - RNA, 18 nt, Artificial Sequence
  Description of Artificial Sequence: Synthetic oligonucleotide
cuaaaauuuaucugcagg

SEQ ID NO: 955 - RNA, 18 nt, Artificial Sequence
  Description of Artificial Sequence: Synthetic oligonucleotide
aucugcuaaaauuuaucu

SEQ ID NO: 956 - RNA, 18 nt, Artificial Sequence
  Description of Artificial Sequence: Synthetic oligonucleotide
ggaucaucugcuaaaauu

SEQ ID NO: 957 - RNA, 18 nt, Artificial Sequence
  Description of Artificial Sequence: Synthetic oligonucleotide
ucuaaggaucaucugcua

SEQ ID NO: 958 - RNA, 18 nt, Artificial Sequence
  Description of Artificial Sequence: Synthetic oligonucleotide
uuagaucuaaggaucauc

SEQ ID NO: 959 - RNA, 18 nt, Artificial Sequence
  Description of Artificial Sequence: Synthetic oligonucleotide
acaacuuagaucuaagga

SEQ ID NO: 960 - RNA, 18 nt, Artificial Sequence
  Description of Artificial Sequence: Synthetic oligonucleotide
uaauuacaacuuagaucu

SEQ ID NO: 961 - RNA, 18 nt, Artificial Sequence
  Description of Artificial Sequence: Synthetic oligonucleotide
ccaaauaauuacaacuua

SEQ ID NO: 962 - RNA, 18 nt, Artificial Sequence
  Description of Artificial Sequence: Synthetic oligonucleotide
aucagccaaauaauuaca

SEQ ID NO: 963 - RNA, 18 nt, Artificial Sequence
  Description of Artificial Sequence: Synthetic oligonucleotide
gcucuaucagccaaauaa

SEQ ID NO: 964 - RNA, 18 nt, Artificial Sequence
  Description of Artificial Sequence: Synthetic oligonucleotide
caauagcucuaucagcca

SEQ ID NO: 965 - RNA, 18 nt, Artificial Sequence
  Description of Artificial Sequence: Synthetic oligonucleotide
ugggucaauagcucuauc

SEQ ID NO: 966 - RNA, 18 nt, Artificial Sequence
  Description of Artificial Sequence: Synthetic oligonucleotide
acacaugggucaauagcu

SEQ ID NO: 967 - RNA, 18 nt, Artificial Sequence
  Description of Artificial Sequence: Synthetic oligonucleotide
ugccaacacaugggucaa

SEQ ID NO: 968 - RNA, 18 nt, Artificial Sequence
  Description of Artificial Sequence: Synthetic oligonucleotide
acaaaugccaacacaugg

SEQ ID NO: 969 - RNA, 18 nt, Artificial Sequence
  Description of Artificial Sequence: Synthetic oligonucleotide
gucuuacaaaugccaaca

SEQ ID NO: 970 - RNA, 18 nt, Artificial Sequence
  Description of Artificial Sequence: Synthetic oligonucleotide
agaaagucuuacaaaugc

SEQ ID NO: 971 - RNA, 18 nt, Artificial Sequence
  Description of Artificial Sequence: Synthetic oligonucleotide
uuuuuagaaagucuuaca

SEQ ID NO: 972 - RNA, 18 nt, Artificial Sequence
  Description of Artificial Sequence: Synthetic oligonucleotide
agcacuuuuuagaaaguc

SEQ ID NO: 973 - RNA, 18 nt, Artificial Sequence
  Description of Artificial Sequence: Synthetic oligonucleotide
gcuggagcacuuuuuaga

SEQ ID NO: 974 - RNA, 18 nt, Artificial Sequence
  Description of Artificial Sequence: Synthetic oligonucleotide
aauuugcuggagcacuuu

SEQ ID NO: 975 - RNA, 18 nt, Artificial Sequence
  Description of Artificial Sequence: Synthetic oligonucleotide
auuaaaauuugcuggagc

SEQ ID NO: 976 - RNA, 18 nt, Artificial Sequence
  Description of Artificial Sequence: Synthetic oligonucleotide
gcaguauuaaaauuugcu

SEQ ID NO: 977 - RNA, 18 nt, Artificial Sequence
  Description of Artificial Sequence: Synthetic oligonucleotide
uuaaagcaguauuaaaau

SEQ ID NO: 978 - RNA, 18 nt, Artificial Sequence
  Description of Artificial Sequence: Synthetic oligonucleotide
gauauuuaaagcaguauu

SEQ ID NO: 979 - RNA, 18 nt, Artificial Sequence
  Description of Artificial Sequence: Synthetic oligonucleotide
gucaugauauuuaaagca

SEQ ID NO: 980 - RNA, 18 nt, Artificial Sequence
  Description of Artificial Sequence: Synthetic oligonucleotide
auggugucaugauauuua

SEQ ID NO: 981 - RNA, 18 nt, Artificial Sequence
  Description of Artificial Sequence: Synthetic oligonucleotide
aguucauggugucaugau

SEQ ID NO: 982 - RNA, 18 nt, Artificial Sequence
  Description of Artificial Sequence: Synthetic oligonucleotide
uuuagaguucaugguguc

SEQ ID NO: 983 - RNA, 18 nt, Artificial Sequence
  Description of Artificial Sequence: Synthetic oligonucleotide
aauucuuuagaguucaug

SEQ ID NO: 984 - RNA, 18 nt, Artificial Sequence
  Description of Artificial Sequence: Synthetic oligonucleotide
uuuucaauucuuuagagu

SEQ ID NO: 985 - RNA, 18 nt, Artificial Sequence
  Description of Artificial Sequence: Synthetic oligonucleotide
agcacuuuucaauucuuu

SEQ ID NO: 986 - RNA, 18 nt, Artificial Sequence
  Description of Artificial Sequence: Synthetic oligonucleotide
ucacaagcacuuuucaau

SEQ ID NO: 987 - RNA, 18 nt, Artificial Sequence
  Description of Artificial Sequence: Synthetic oligonucleotide
ccaacucacaagcacuuu

SEQ ID NO: 988 - RNA, 18 nt, Artificial Sequence
  Description of Artificial Sequence: Synthetic oligonucleotide
gauaaccaacucacaagc

SEQ ID NO: 989 - RNA, 18 nt, Artificial Sequence
  Description of Artificial Sequence: Synthetic oligonucleotide
cccuugauaaccaacuca

SEQ ID NO: 990 - RNA, 18 nt, Artificial Sequence
  Description of Artificial Sequence: Synthetic oligonucleotide
uccuccccuugauaacca

SEQ ID NO: 991 - RNA, 18 nt, Artificial Sequence
  Description of Artificial Sequence: Synthetic oligonucleotide
auauauccuccccuugau

SEQ ID NO: 992 - RNA, 18 nt, Artificial Sequence
  Description of Artificial Sequence: Synthetic oligonucleotide
auuugauauauccucccc

SEQ ID NO: 993 - RNA, 18 nt, Artificial Sequence
  Description of Artificial Sequence: Synthetic oligonucleotide
uggccauuugauauaucc

SEQ ID NO: 994 - RNA, 18 nt, Artificial Sequence
  Description of Artificial Sequence: Synthetic oligonucleotide
caaaauggccauuugaua

SEQ ID NO: 995 - RNA, 18 nt, Artificial Sequence
  Description of Artificial Sequence: Synthetic oligonucleotide
uugaacaaaauggccauu

SEQ ID NO: 996 - RNA, 18 nt, Artificial Sequence
  Description of Artificial Sequence: Synthetic oligonucleotide
acauauugaacaaaaugg

SEQ ID NO: 997 - RNA, 18 nt, Artificial Sequence
  Description of Artificial Sequence: Synthetic oligonucleotide
agaacacauauugaacaa

SEQ ID NO: 998 - RNA, 18 nt, Artificial Sequence
  Description of Artificial Sequence: Synthetic oligonucleotide
uuucuagaacacauauug

SEQ ID NO: 999 - RNA, 18 nt, Artificial Sequence
  Description of Artificial Sequence: Synthetic oligonucleotide
uuucauuucuagaacaca

SEQ ID NO: 1000 - RNA, 18 nt, Artificial Sequence
  Description of Artificial Sequence: Synthetic oligonucleotide
uggcuuuucauuucuaga

SEQ ID NO: 1001 - RNA, 18 nt, Artificial Sequence
  Description of Artificial Sequence: Synthetic oligonucleotide
uaguauggcuuuucauuu

SEQ ID NO: 1002 - RNA, 18 nt, Artificial Sequence
  Description of Artificial Sequence: Synthetic oligonucleotide
uauuuuaguauggcuuuu

SEQ ID NO: 1003 - RNA, 18 nt, Artificial Sequence
  Description of Artificial Sequence: Synthetic oligonucleotide
gacaguauuuuaguaugg

SEQ ID NO: 1004 - RNA, 18 nt, Artificial Sequence
  Description of Artificial Sequence: Synthetic oligonucleotide
accaagacaguauuuuag

SEQ ID NO: 1005 - RNA, 18 nt, Artificial Sequence
  Description of Artificial Sequence: Synthetic oligonucleotide
uuuggaccaagacaguau

SEQ ID NO: 1006 - RNA, 18 nt, Artificial Sequence
  Description of Artificial Sequence: Synthetic oligonucleotide
cagauuuuggaccaagac

SEQ ID NO: 1007 - RNA, 18 nt, Artificial Sequence
  Description of Artificial Sequence: Synthetic oligonucleotide
uuacacagauuuuggacc

SEQ ID NO: 1008 - RNA, 18 nt, Artificial Sequence
  Description of Artificial Sequence: Synthetic oligonucleotide
aaauuuuacacagauuuu

SEQ ID NO: 1009 - RNA, 18 nt, Artificial Sequence
  Description of Artificial Sequence: Synthetic oligonucleotide
aaaacaaauuuuacacag

SEQ ID NO: 1010 - RNA, 18 nt, Artificial Sequence
  Description of Artificial Sequence: Synthetic oligonucleotide
auuucaaaacaaauuuua

SEQ ID NO: 1011 - RNA, 18 nt, Artificial Sequence
  Description of Artificial Sequence: Synthetic oligonucleotide
aagacauuucaaaacaaa

SEQ ID NO: 1012 - RNA, 18 nt, Artificial Sequence
  Description of Artificial Sequence: Synthetic oligonucleotide
uuugaaagacauuucaaa

SEQ ID NO: 1013 - RNA, 18 nt, Artificial Sequence
  Description of Artificial Sequence: Synthetic oligonucleotide
auauuuuugaaagacauu

SEQ ID NO: 1014 - RNA, 18 nt, Artificial Sequence
  Description of Artificial Sequence: Synthetic oligonucleotide
agggaauauuuuugaaag

SEQ ID NO: 1015 - RNA, 18 nt, Artificial Sequence
  Description of Artificial Sequence: Synthetic oligonucleotide
ucaaaagggaauauuuuu

SEQ ID NO: 1016 - RNA, 18 nt, Artificial Sequence
  Description of Artificial Sequence: Synthetic oligonucleotide
aauuuucaaaagggaaua

SEQ ID NO: 1017 - RNA, 18 nt, Artificial Sequence
  Description of Artificial Sequence: Synthetic oligonucleotide
gauauaauuuucaaaagg

SEQ ID NO: 1018 - RNA, 18 nt, Artificial Sequence
  Description of Artificial Sequence: Synthetic oligonucleotide
uuacugauauaauuuuca

SEQ ID NO: 1019 - RNA, 18 nt, Artificial Sequence
  Description of Artificial Sequence: Synthetic oligonucleotide
uauucuuacugauauaau

SEQ ID NO: 1020 - RNA, 18 nt, Artificial Sequence
  Description of Artificial Sequence: Synthetic oligonucleotide
auaaauauucuuacugau

SEQ ID NO: 1021 - RNA, 18 nt, Artificial Sequence
  Description of Artificial Sequence: Synthetic oligonucleotide
guuuaauaaauauucuua

SEQ ID NO: 1022 - RNA, 18 nt, Artificial Sequence
  Description of Artificial Sequence: Synthetic oligonucleotide
cugauguuuaauaaauau

SEQ ID NO: 1023 - RNA, 18 nt, Artificial Sequence
  Description of Artificial Sequence: Synthetic oligonucleotide
uagaccugauguuuaaua

SEQ ID NO: 1024 - RNA, 18 nt, Artificial Sequence
  Description of Artificial Sequence: Synthetic oligonucleotide
uaauuuagaccugauguu

SEQ ID NO: 1025 - RNA, 18 nt, Artificial Sequence
  Description of Artificial Sequence: Synthetic oligonucleotide
aaaaauaauuuagaccug

SEQ ID NO: 1026 - RNA, 18 nt, Artificial Sequence
  Description of Artificial Sequence: Synthetic oligonucleotide
ggaguaaaaauaauuuag

SEQ ID NO: 1027 - RNA, 18 nt, Artificial Sequence
  Description of Artificial Sequence: Synthetic oligonucleotide
acuuuggaguaaaaauaa

SEQ ID NO: 1028 - RNA, 18 nt, Artificial Sequence
  Description of Artificial Sequence: Synthetic oligonucleotide
guuuuacuuuggaguaaa

SEQ ID NO: 1029 - RNA, 18 nt, Artificial Sequence
  Description of Artificial Sequence: Synthetic oligonucleotide
ugcauguuuuacuuugga

SEQ ID NO: 1030 - RNA, 18 nt, Artificial Sequence
  Description of Artificial Sequence: Synthetic oligonucleotide
uccauccuuugaaugugg

SEQ ID NO: 1031 - RNA, 18 nt, Artificial Sequence
  Description of Artificial Sequence: Synthetic oligonucleotide
auccauccauccuuugaa

SEQ ID NO: 1032 - RNA, 18 nt, Artificial Sequence
  Description of Artificial Sequence: Synthetic oligonucleotide
auuauauccauccauccu

SEQ ID NO: 1033 - RNA, 18 nt, Artificial Sequence
  Description of Artificial Sequence: Synthetic oligonucleotide
cauacauuauauccaucc

SEQ ID NO: 1034 - RNA, 18 nt, Artificial Sequence
  Description of Artificial Sequence: Synthetic oligonucleotide
ugcugcauacauuauauc

SEQ ID NO: 1035 - RNA, 18 nt, Artificial Sequence
  Description of Artificial Sequence: Synthetic oligonucleotide
ucaacugcugcauacauu

SEQ ID NO: 1036 - RNA, 18 nt, Artificial Sequence
  Description of Artificial Sequence: Synthetic oligonucleotide
uggaaucaacugcugcau

SEQ ID NO: 1037 - RNA, 18 nt, Artificial Sequence
  Description of Artificial Sequence: Synthetic oligonucleotide
auuucuggaaucaacugc

SEQ ID NO: 1038 - RNA, 18 nt, Artificial Sequence
  Description of Artificial Sequence: Synthetic oligonucleotide
cuccuccaccagcaucag

SEQ ID NO: 1039 - RNA, 18 nt, Artificial Sequence
  Description of Artificial Sequence: Synthetic oligonucleotide
agcuccuccuccaccagc

SEQ ID NO: 1040 - RNA, 18 nt, Artificial Sequence
  Description of Artificial Sequence: Synthetic oligonucleotide
ggcgcagcuccuccucca

SEQ ID NO: 1041 - RNA, 18 nt, Artificial Sequence
  Description of Artificial Sequence: Synthetic oligonucleotide
gucccggcgcagcuccuc

SEQ ID NO: 1042 - RNA, 18 nt, Artificial Sequence
  Description of Artificial Sequence: Synthetic oligonucleotide
ggguggucccggcgcagc

SEQ ID NO: 1043 - RNA, 18 nt, Artificial Sequence
  Description of Artificial Sequence: Synthetic oligonucleotide
cggcucagccauggcggg

SEQ ID NO: 1044 - RNA, 18 nt, Artificial Sequence
  Description of Artificial Sequence: Synthetic oligonucleotide
cagcggcucagccauggc

SEQ ID NO: 1045 - RNA, 18 nt, Artificial Sequence
  Description of Artificial Sequence: Synthetic oligonucleotide
ucuggcagcggcucagcc

SEQ ID NO: 1046 - RNA, 18 nt, Artificial Sequence
  Description of Artificial Sequence: Synthetic oligonucleotide
uggguucuggcagcggcu

SEQ ID NO: 1047 - RNA, 18 nt, Artificial Sequence
  Description of Artificial Sequence: Synthetic oligonucleotide
cuucuuggguucuggcag

SEQ ID NO: 1048 - RNA, 18 nt, Artificial Sequence
  Description of Artificial Sequence: Synthetic oligonucleotide
agccucuucuuggguucu

SEQ ID NO: 1049 - RNA, 18 nt, Artificial Sequence
  Description of Artificial Sequence: Synthetic oligonucleotide
cgagcagccucuucuugg

SEQ ID NO: 1050 - RNA, 18 nt, Artificial Sequence
  Description of Artificial Sequence: Synthetic oligonucleotide
agcgucgagcagccucuu

SEQ ID NO: 1051 - RNA, 18 nt, Artificial Sequence
  Description of Artificial Sequence: Synthetic oligonucleotide
auaaaugacauuguaauu

SEQ ID NO: 1052 - RNA, 18 nt, Artificial Sequence
  Description of Artificial Sequence: Synthetic oligonucleotide
agaagauaaaugacauug

SEQ ID NO: 1053 - RNA, 18 nt, Artificial Sequence
  Description of Artificial Sequence: Synthetic oligonucleotide
cacggagaagauaaauga

SEQ ID NO: 1054 - RNA, 18 nt, Artificial Sequence
  Description of Artificial Sequence: Synthetic oligonucleotide
ugggacacggagaagaua

SEQ ID NO: 1055 - RNA, 18 nt, Artificial Sequence
  Description of Artificial Sequence: Synthetic oligonucleotide
gggaugggacacggagaa

SEQ ID NO: 1056 - RNA, 18 nt, Artificial Sequence
  Description of Artificial Sequence: Synthetic oligonucleotide
gacagugggauggauggg

SEQ ID NO: 1057 - RNA, 18 nt, Artificial Sequence
  Description of Artificial Sequence: Synthetic oligonucleotide
cgaaagacagugggaugg

SEQ ID NO: 1058 - RNA, 18 nt, Artificial Sequence
  Description of Artificial Sequence: Synthetic oligonucleotide
gugcacgaaagacagugg

SEQ ID NO: 1059 - RNA, 18 nt, Artificial Sequence
  Description of Artificial Sequence: Synthetic oligonucleotide
agugagugcacgaaagac

SEQ ID NO: 1060 - RNA, 18 nt, Artificial Sequence
  Description of Artificial Sequence: Synthetic oligonucleotide
gguguagugagugcacga

SEQ ID NO: 1061 - RNA, 18 nt, Artificial Sequence
  Description of Artificial Sequence: Synthetic oligonucleotide
uggcugguguagugagug

SEQ ID NO: 1062 - RNA, 18 nt, Artificial Sequence
  Description of Artificial Sequence: Synthetic oligonucleotide
cuagguggcugguguagu

SEQ ID NO: 1063 - RNA, 18 nt, Artificial Sequence
  Description of Artificial Sequence: Synthetic oligonucleotide
gggcuagguggcuggugu

SEQ ID NO: 1064 - RNA, 18 nt, Artificial Sequence
  Description of Artificial Sequence: Synthetic oligonucleotide
gagacagauggugauggg

SEQ ID NO: 1065 - RNA, 18 nt, Artificial Sequence
  Description of Artificial Sequence: Synthetic oligonucleotide
uaugagagacagauggug

SEQ ID NO: 1066 - RNA, 18 nt, Artificial Sequence
  Description of Artificial Sequence: Synthetic oligonucleotide
cagacuaugagagacaga

SEQ ID NO: 1067 - RNA, 18 nt, Artificial Sequence
  Description of Artificial Sequence: Synthetic oligonucleotide
aacagcagacuaugagag

SEQ ID NO: 1068 - RNA, 18 nt, Artificial Sequence
  Description of Artificial Sequence: Synthetic oligonucleotide
ggacaaacagcagacuau

SEQ ID NO: 1069 - RNA, 18 nt, Artificial Sequence
  Description of Artificial Sequence: Synthetic oligonucleotide
ccaguggacaaacagcag

SEQ ID NO: 1070 - RNA, 18 nt, Artificial Sequence
  Description of Artificial Sequence: Synthetic oligonucleotide
agcagccaguggacaaac

SEQ ID NO: 1071 - RNA, 18 nt, Artificial Sequence
  Description of Artificial Sequence: Synthetic oligonucleotide
ccaggagcagccagugga

SEQ ID NO: 1072 - RNA, 18 nt, Artificial Sequence
  Description of Artificial Sequence: Synthetic oligonucleotide
ggcugccaggagcagcca

SEQ ID NO: 1073 - RNA, 18 nt, Artificial Sequence
  Description of Artificial Sequence: Synthetic oligonucleotide
gggcugccaggagcagcc

SEQ ID NO: 1074 - RNA, 18 nt, Artificial Sequence
  Description of Artificial Sequence: Synthetic oligonucleotide
cgaugggaugaagauggg

SEQ ID NO: 1075 - RNA, 18 nt, Artificial Sequence
  Description of Artificial Sequence: Synthetic oligonucleotide
acagacgaugggaugaag

SEQ ID NO: 1076 - RNA, 18 nt, Artificial Sequence
  Description of Artificial Sequence: Synthetic oligonucleotide
aaggcacagacgauggga

SEQ ID NO: 1077 - RNA, 18 nt, Artificial Sequence
  Description of Artificial Sequence: Synthetic oligonucleotide
ugacaaaggcacagacga

SEQ ID NO: 1078 - RNA, 18 nt, Artificial Sequence
  Description of Artificial Sequence: Synthetic oligonucleotide
aggagugacaaaggcaca

SEQ ID NO: 1079 - RNA, 18 nt, Artificial Sequence
  Description of Artificial Sequence: Synthetic oligonucleotide
cugccaggagugacaaag

SEQ ID NO: 1080 - RNA, 18 nt, Artificial Sequence
  Description of Artificial Sequence: Synthetic oligonucleotide
ugacgcugccaggaguga

SEQ ID NO: 1081 - RNA, 18 nt, Artificial Sequence
  Description of Artificial Sequence: Synthetic oligonucleotide
ugggcugacgcugccagg

SEQ ID NO: 1082 - RNA, 18 nt, Artificial Sequence
  Description of Artificial Sequence: Synthetic oligonucleotide
ggaguugggcugacgcug

SEQ ID NO: 1083 - RNA, 18 nt, Artificial Sequence
  Description of Artificial Sequence: Synthetic oligonucleotide
gcacaggaguugggcuga

SEQ ID NO: 1084 - RNA, 18 nt, Artificial Sequence
  Description of Artificial Sequence: Synthetic oligonucleotide
ggaaggcacaggaguugg

SEQ ID NO: 1085 - RNA, 18 nt, Artificial Sequence
  Description of Artificial Sequence: Synthetic oligonucleotide
ggaugggaaggcacagga

SEQ ID NO: 1086 - RNA, 18 nt, Artificial Sequence
  Description of Artificial Sequence: Synthetic oligonucleotide
agacuggaugggaaggca

SEQ ID NO: 1087 - RNA, 18 nt, Artificial Sequence
  Description of Artificial Sequence: Synthetic oligonucleotide
ugggaagacuggauggga

SEQ ID NO: 1088 - RNA, 18 nt, Artificial Sequence
  Description of Artificial Sequence: Synthetic oligonucleotide
aggagugggaagacugga

SEQ ID NO: 1089 - RNA, 18 nt, Artificial Sequence
  Description of Artificial Sequence: Synthetic oligonucleotide
cagagaggagugggaaga

SEQ ID NO: 1090 - RNA, 18 nt, Artificial Sequence
  Description of Artificial Sequence: Synthetic oligonucleotide
agaugcagagaggagugg

SEQ ID NO: 1091 - RNA, 18 nt, Artificial Sequence
  Description of Artificial Sequence: Synthetic oligonucleotide
uccugagaugcagagagg

SEQ ID NO: 1092 - RNA, 18 nt, Artificial Sequence
  Description of Artificial Sequence: Synthetic oligonucleotide
gaagguccugagaugcag

SEQ ID NO: 1093 - RNA, 18 nt, Artificial Sequence
  Description of Artificial Sequence: Synthetic oligonucleotide
guagagaagguccugaga

SEQ ID NO: 1094 - RNA, 18 nt, Artificial Sequence
  Description of Artificial Sequence: Synthetic oligonucleotide
uucugguagagaaggucc

SEQ ID NO: 1095 - RNA, 18 nt, Artificial Sequence
  Description of Artificial Sequence: Synthetic oligonucleotide
caagguucugguagagaa

SEQ ID NO: 1096 - RNA, 18 nt, Artificial Sequence
  Description of Artificial Sequence: Synthetic oligonucleotide
aagaccaagguucuggua

SEQ ID NO: 1097 - RNA, 18 nt, Artificial Sequence
  Description of Artificial Sequence: Synthetic oligonucleotide
gcagaaagaccaagguuc

SEQ ID NO: 1098 - RNA, 18 nt, Artificial Sequence
  Description of Artificial Sequence: Synthetic oligonucleotide
gggcagaaagaccaaggu

SEQ ID NO: 1099 - RNA, 18 nt, Artificial Sequence
  Description of Artificial Sequence: Synthetic oligonucleotide
uucuuggaacuagguggg

SEQ ID NO: 1100 - RNA, 18 nt, Artificial Sequence
  Description of Artificial Sequence: Synthetic oligonucleotide
ggguucuuggaacuaggu

SEQ ID NO: 1101 - RNA, 18 nt, Artificial Sequence
  Description of Artificial Sequence: Synthetic oligonucleotide
ggagugagcaaagaaggg

SEQ ID NO: 1102 - RNA, 18 nt, Artificial Sequence
  Description of Artificial Sequence: Synthetic oligonucleotide
gaauaggagugagcaaag

SEQ ID NO: 1103 - RNA, 18 nt, Artificial Sequence
  Description of Artificial Sequence: Synthetic oligonucleotide
ggcuugaauaggagugag

SEQ ID NO: 1104 - RNA, 18 nt, Artificial Sequence
  Description of Artificial Sequence: Synthetic oligonucleotide
aacguggcuugaauagga

SEQ ID NO: 1105 - RNA, 18 nt, Artificial Sequence
  Description of Artificial Sequence: Synthetic oligonucleotide
ugaacaacguggcuugaa

SEQ ID NO: 1106 - RNA, 18 nt, Artificial Sequence
  Description of Artificial Sequence: Synthetic oligonucleotide
gaagcugaacaacguggc

SEQ ID NO: 1107 - RNA, 18 nt, Artificial Sequence
  Description of Artificial Sequence: Synthetic oligonucleotide
cagaggaagcugaacaac

SEQ ID NO: 1108 - RNA, 18 nt, Artificial Sequence
  Description of Artificial Sequence: Synthetic oligonucleotide
gagcgcagaggaagcuga

SEQ ID NO: 1109 - RNA, 18 nt, Artificial Sequence
  Description of Artificial Sequence: Synthetic oligonucleotide
cccaagagcgcagaggaa

SEQ ID NO: 1110 - RNA, 18 nt, Artificial Sequence
  Description of Artificial Sequence: Synthetic oligonucleotide
ucuggcccaagagcgcag

SEQ ID NO: 1111 - RNA, 18 nt, Artificial Sequence
  Description of Artificial Sequence: Synthetic oligonucleotide
agcccucuggcccaagag

SEQ ID NO: 1112 - RNA, 18 nt, Artificial Sequence
  Description of Artificial Sequence: Synthetic oligonucleotide
cuucuagcccucuggccc

SEQ ID NO: 1113 - RNA, 18 nt, Artificial Sequence
  Description of Artificial Sequence: Synthetic oligonucleotide
ggcagcuucuagcccucu

SEQ ID NO: 1114 - RNA, 18 nt, Artificial Sequence
  Description of Artificial Sequence: Synthetic oligonucleotide
aaaacggcagcuucuagc

SEQ ID NO: 1115 - RNA, 18 nt, Artificial Sequence
  Description of Artificial Sequence: Synthetic oligonucleotide
uccagaaaacggcagcuu

SEQ ID NO: 1116 - RNA, 18 nt, Artificial Sequence
  Description of Artificial Sequence: Synthetic oligonucleotide
ucuauuccagaaaacggc

SEQ ID NO: 1117 - RNA, 18 nt, Artificial Sequence
  Description of Artificial Sequence: Synthetic oligonucleotide
ugugcucuauuccagaaa

SEQ ID NO: 1118 - RNA, 18 nt, Artificial Sequence
  Description of Artificial Sequence: Synthetic oligonucleotide
ugcccugugcucuauucc

SEQ ID NO: 1119 - RNA, 18 nt, Artificial Sequence
  Description of Artificial Sequence: Synthetic oligonucleotide
cauacugcccugugcucu

SEQ ID NO: 1120 - RNA, 18 nt, Artificial Sequence
  Description of Artificial Sequence: Synthetic oligonucleotide
cagaucauacugcccugu

SEQ ID NO: 1121 - RNA, 18 nt, Artificial Sequence
  Description of Artificial Sequence: Synthetic oligonucleotide
aacuacagaucauacugc

SEQ ID NO: 1122 - RNA, 18 nt, Artificial Sequence
  Description of Artificial Sequence: Synthetic oligonucleotide
ggagaaacuacagaucau

SEQ ID NO: 1123 - RNA, 18 nt, Artificial Sequence
  Description of Artificial Sequence: Synthetic oligonucleotide
ggccuggagaaacuacag

SEQ ID NO: 1124 - RNA, 18 nt, Artificial Sequence
  Description of Artificial Sequence: Synthetic oligonucleotide
gccagggccuggagaaac

SEQ ID NO: 1125 - RNA, 18 nt, Artificial Sequence
  Description of Artificial Sequence: Synthetic oligonucleotide
uaccggccagggccugga

SEQ ID NO: 1126 - RNA, 18 nt, Artificial Sequence
  Description of Artificial Sequence: Synthetic oligonucleotide
caggguaccggccagggc

SEQ ID NO: 1127 - RNA, 18 nt, Artificial Sequence
  Description of Artificial Sequence: Synthetic oligonucleotide
guuuucaggguaccggcc

SEQ ID NO: 1128 - RNA, 18 nt, Artificial Sequence
  Description of Artificial Sequence: Synthetic oligonucleotide
cccaaguuuucaggguac

SEQ ID NO: 1129 - RNA, 18 nt, Artificial Sequence
  Description of Artificial Sequence: Synthetic oligonucleotide
ggguccccaaguuuucag

SEQ ID NO: 1130 - RNA, 18 nt, Artificial Sequence
  Description of Artificial Sequence: Synthetic oligonucleotide
gugauggguccccaaguu

SEQ ID NO: 1131 - RNA, 18 nt, Artificial Sequence
  Description of Artificial Sequence: Synthetic oligonucleotide
cagaggugaugggucccc

SEQ ID NO: 1132 - RNA, 18 nt, Artificial Sequence
  Description of Artificial Sequence: Synthetic oligonucleotide
gagaacagaggugauggg

SEQ ID NO: 1133 - RNA, 18 nt, Artificial Sequence
  Description of Artificial Sequence: Synthetic oligonucleotide
gccaagagaacagaggug

SEQ ID NO: 1134 - RNA, 18 nt, Artificial Sequence
  Description of Artificial Sequence: Synthetic oligonucleotide
agggagccaagagaacag

SEQ ID NO: 1135 - RNA, 18 nt, Artificial Sequence
  Description of Artificial Sequence: Synthetic oligonucleotide
aaauuagggagccaagag

SEQ ID NO: 1136 - RNA, 18 nt, Artificial Sequence
  Description of Artificial Sequence: Synthetic oligonucleotide
caggaaaauuagggagcc

SEQ ID NO: 1137 - RNA, 18 nt, Artificial Sequence
  Description of Artificial Sequence: Synthetic oligonucleotide
aaaacugagcuugcauuu

SEQ ID NO: 1138 - RNA, 18 nt, Artificial Sequence
  Description of Artificial Sequence: Synthetic oligonucleotide
gaagaaaaacugagcuug

SEQ ID NO: 1139 - RNA, 18 nt, Artificial Sequence
  Description of Artificial Sequence: Synthetic oligonucleotide
aaucugaagaaaaacuga

SEQ ID NO: 1140 - RNA, 18 nt, Artificial Sequence
  Description of Artificial Sequence: Synthetic oligonucleotide
uucauaaucugaagaaaa

SEQ ID NO: 1141 - RNA, 18 nt, Artificial Sequence
  Description of Artificial Sequence: Synthetic oligonucleotide
auuucuucauaaucugaa

SEQ ID NO: 1142 - RNA, 18 nt, Artificial Sequence
  Description of Artificial Sequence: Synthetic oligonucleotide
uuggaauuucuucauaau

SEQ ID NO: 1143 - RNA, 18 nt, Artificial Sequence
  Description of Artificial Sequence: Synthetic oligonucleotide
uggauuuggaauuucuuc

SEQ ID NO: 1144 - RNA, 18 nt, Artificial Sequence
  Description of Artificial Sequence: Synthetic oligonucleotide
cccuguggauuuggaauu

SEQ ID NO: 1145 - RNA, 18 nt, Artificial Sequence
  Description of Artificial Sequence: Synthetic oligonucleotide
caaaccccuguggauuug

SEQ ID NO: 1146 - RNA, 18 nt, Artificial Sequence
  Description of Artificial Sequence: Synthetic oligonucleotide
uaauccaaaccccugugg

SEQ ID NO: 1147 - RNA, 18 nt, Artificial Sequence
  Description of Artificial Sequence: Synthetic oligonucleotide
cucauuaauccaaacccc

SEQ ID NO: 1148 - RNA, 18 nt, Artificial Sequence
  Description of Artificial Sequence: Synthetic oligonucleotide
aaaaccucauuaauccaa

SEQ ID NO: 1149 - RNA, 18 nt, Artificial Sequence
  Description of Artificial Sequence: Synthetic oligonucleotide
acagcaaaaccucauuaa

SEQ ID NO: 1150 - RNA, 18 nt, Artificial Sequence
  Description of Artificial Sequence: Synthetic oligonucleotide
gcaguacagcaaaaccuc

SEQ ID NO: 1151 - RNA, 18 nt, Artificial Sequence
  Description of Artificial Sequence: Synthetic oligonucleotide
gggaggcaguacagcaaa

SEQ ID NO: 1152 - RNA, 18 nt, Artificial Sequence
  Description of Artificial Sequence: Synthetic oligonucleotide
cauguugaggaauaaggg

SEQ ID NO: 1153 - RNA, 18 nt, Artificial Sequence
  Description of Artificial Sequence: Synthetic oligonucleotide
uucauguugaggaauaag

SEQ ID NO: 1154 - RNA, 18 nt, Artificial Sequence
  Description of Artificial Sequence: Synthetic oligonucleotide
ggaacuucauguugagga

SEQ ID NO: 1155 - RNA, 18 nt, Artificial Sequence
  Description of Artificial Sequence: Synthetic oligonucleotide
aggugggaacuucauguu

SEQ ID NO: 1156 - RNA, 18 nt, Artificial Sequence
  Description of Artificial Sequence: Synthetic oligonucleotide
auccgaggugggaacuuc

SEQ ID NO: 1157 - RNA, 18 nt, Artificial Sequence
  Description of Artificial Sequence: Synthetic oligonucleotide
ccccaauccgagguggga

SEQ ID NO: 1158 - RNA, 18 nt, Artificial Sequence
  Description of Artificial Sequence: Synthetic oligonucleotide
cccauccccaauccgagg

SEQ ID NO: 1159 - RNA, 18 nt, Artificial Sequence
  Description of Artificial Sequence: Synthetic oligonucleotide
ucccacccauccccaauc

SEQ ID NO: 1160 - RNA, 18 nt, Artificial Sequence
  Description of Artificial Sequence: Synthetic oligonucleotide
cccccucccacccauccc

SEQ ID NO: 1161 - RNA, 18 nt, Artificial Sequence
  Description of Artificial Sequence: Synthetic oligonucleotide
ugaaacccccucccaccc

SEQ ID NO: 1162 - RNA, 18 nt, Artificial Sequence
  Description of Artificial Sequence: Synthetic oligonucleotide
ccucuugaaacccccucc

SEQ ID NO: 1163 - RNA, 18 nt, Artificial Sequence
  Description of Artificial Sequence: Synthetic oligonucleotide
cuccuccucuugaaaccc

SEQ ID NO: 1164 - RNA, 18 nt, Artificial Sequence
  Description of Artificial Sequence: Synthetic oligonucleotide
ccacccuccuccucuuga

SEQ ID NO: 1165 - RNA, 18 nt, Artificial Sequence
  Description of Artificial Sequence: Synthetic oligonucleotide
ccaucccacccuccuccu

SEQ ID NO: 1166 - RNA, 18 nt, Artificial Sequence
  Description of Artificial Sequence: Synthetic oligonucleotide
cuugcccaucccacccuc

SEQ ID NO: 1167 - RNA, 18 nt, Artificial Sequence
  Description of Artificial Sequence: Synthetic oligonucleotide
uauuccuugcccauccca

SEQ ID NO: 1168 - RNA, 18 nt, Artificial Sequence
  Description of Artificial Sequence: Synthetic oligonucleotide
guguauauuccuugccca

SEQ ID NO: 1169 - RNA, 18 nt, Artificial Sequence
  Description of Artificial Sequence: Synthetic oligonucleotide
caccuguguauauuccuu

SEQ ID NO: 1170 - RNA, 18 nt, Artificial Sequence
  Description of Artificial Sequence: Synthetic oligonucleotide
ggcuucaccuguguauau

SEQ ID NO: 1171 - RNA, 18 nt, Artificial Sequence
  Description of Artificial Sequence: Synthetic oligonucleotide
ucucuggcuucaccugug

SEQ ID NO: 1172 - RNA, 18 nt, Artificial Sequence
  Description of Artificial Sequence: Synthetic oligonucleotide
acccuucucuggcuucac

SEQ ID NO: 1173 - RNA, 18 nt, Artificial Sequence
  Description of Artificial Sequence: Synthetic oligonucleotide
accuaacccuucucuggc

SEQ ID NO: 1174 - RNA, 18 nt, Artificial Sequence
  Description of Artificial Sequence: Synthetic oligonucleotide
ccccaaccuaacccuucu

SEQ ID NO: 1175 - RNA, 18 nt, Artificial Sequence
  Description of Artificial Sequence: Synthetic oligonucleotide
cgcacccccaaccuaacc

SEQ ID NO: 1176 - RNA, 18 nt, Artificial Sequence
  Description of Artificial Sequence: Synthetic oligonucleotide
cccaccgcacccccaacc

SEQ ID NO: 1177 - RNA, 18 nt, Artificial Sequence
  Description of Artificial Sequence: Synthetic oligonucleotide
aaguucccaccgcacccc

SEQ ID NO: 1178 - RNA, 18 nt, Artificial Sequence
  Description of Artificial Sequence: Synthetic oligonucleotide
acagcaaguucccaccgc

SEQ ID NO: 1179 - RNA, 18 nt, Artificial Sequence
  Description of Artificial Sequence: Synthetic oligonucleotide
ucaaaacagcaaguuccc

SEQ ID NO: 1180 - RNA, 18 nt, Artificial Sequence
  Description of Artificial Sequence: Synthetic oligonucleotide
ccagaucaaaacagcaag

SEQ ID NO: 1181 - RNA, 18 nt, Artificial Sequence
  Description of Artificial Sequence: Synthetic oligonucleotide
ggaaaccagaucaaaaca

SEQ ID NO: 1182 - RNA, 18 nt, Artificial Sequence
  Description of Artificial Sequence: Synthetic oligonucleotide
caccaggaaaccagauca

SEQ ID NO: 1183 - RNA, 18 nt, Artificial Sequence
  Description of Artificial Sequence: Synthetic oligonucleotide
ugucacaccaggaaacca

SEQ ID NO: 1184 - RNA, 18 nt, Artificial Sequence
  Description of Artificial Sequence: Synthetic oligonucleotide
cagagugucacaccagga

SEQ ID NO: 1185 - RNA, 18 nt, Artificial Sequence
  Description of Artificial Sequence: Synthetic oligonucleotide
uaacccagagugucacac

SEQ ID NO: 1186 - RNA, 18 nt, Artificial Sequence
  Description of Artificial Sequence: Synthetic oligonucleotide
gccuuuaacccagagugu

SEQ ID NO: 1187 - RNA, 18 nt, Artificial Sequence
  Description of Artificial Sequence: Synthetic oligonucleotide
uucaagccuuuaacccag

SEQ ID NO: 1188 - RNA, 18 nt, Artificial Sequence
  Description of Artificial Sequence: Synthetic oligonucleotide
gggccuucaagccuuuaa

SEQ ID NO: 1189 - RNA, 18 nt, Artificial Sequence
  Description of Artificial Sequence: Synthetic oligonucleotide
ccuagacuccuaacaggg

SEQ ID NO: 1190 - RNA, 18 nt, Artificial Sequence
  Description of Artificial Sequence: Synthetic oligonucleotide
ccccuagacuccuaacag

SEQ ID NO: 1191 - RNA, 18 nt, Artificial Sequence
  Description of Artificial Sequence: Synthetic oligonucleotide
ucucaccccuagacuccu

SEQ ID NO: 1192 - RNA, 18 nt, Artificial Sequence
  Description of Artificial Sequence: Synthetic oligonucleotide
gagaaucucaccccuaga

SEQ ID NO: 1193 - RNA, 18 nt, Artificial Sequence
  Description of Artificial Sequence: Synthetic oligonucleotide
gagaagagaaucucaccc

SEQ ID NO: 1194 - RNA, 18 nt, Artificial Sequence
  Description of Artificial Sequence: Synthetic oligonucleotide
ucagagagaagagaaucu

SEQ ID NO: 1195 - RNA, 18 nt, Artificial Sequence
  Description of Artificial Sequence: Synthetic oligonucleotide
ugggaucagagagaagag

SEQ ID NO: 1196 - RNA, 18 nt, Artificial Sequence
  Description of Artificial Sequence: Synthetic oligonucleotide
uccucugggaucagagag

SEQ ID NO: 1197 - RNA, 18 nt, Artificial Sequence
  Description of Artificial Sequence: Synthetic oligonucleotide
uaacguccucugggauca

SEQ ID NO: 1198 - RNA, 18 nt, Artificial Sequence
  Description of Artificial Sequence: Synthetic oligonucleotide
gaaguuaacguccucugg

SEQ ID NO: 1199 - RNA, 18 nt, Artificial Sequence
  Description of Artificial Sequence: Synthetic oligonucleotide
caguagaaguuaacgucc

SEQ ID NO: 1200 - RNA, 18 nt, Artificial Sequence
  Description of Artificial Sequence: Synthetic oligonucleotide
accugcaguagaaguuaa

SEQ ID NO: 1201 - RNA, 18 nt, Artificial Sequence
  Description of Artificial Sequence: Synthetic oligonucleotide
uucucaccugcaguagaa

SEQ ID NO: 1202 - RNA, 18 nt, Artificial Sequence
  Description of Artificial Sequence: Synthetic oligonucleotide
uuuguuucucaccugcag

SEQ ID NO: 1203 - RNA, 18 nt, Artificial Sequence
  Description of Artificial Sequence: Synthetic oligonucleotide
ccuauuuuguuucucacc

SEQ ID NO: 1204 - RNA, 18 nt, Artificial Sequence
  Description of Artificial Sequence: Synthetic oligonucleotide
auccuccuauuuuguuuc

SEQ ID NO: 1205 - RNA, 18 nt, Artificial Sequence
  Description of Artificial Sequence: Synthetic oligonucleotide
ccaccauccuccuauuuu

SEQ ID NO: 1206 - RNA, 18 nt, Artificial Sequence
  Description of Artificial Sequence: Synthetic oligonucleotide
aguccccaccauccuccu

SEQ ID NO: 1207 - RNA, 18 nt, Artificial Sequence
  Description of Artificial Sequence: Synthetic oligonucleotide
aggacaguccccaccauc

SEQ ID NO: 1208 - RNA, 18 nt, Artificial Sequence
  Description of Artificial Sequence: Synthetic oligonucleotide
cucccaggacagucccca

SEQ ID NO: 1209 - RNA, 18 nt, Artificial Sequence
  Description of Artificial Sequence: Synthetic oligonucleotide
cccuccucccaggacagu

SEQ ID NO: 1210 - RNA, 18 nt, Artificial Sequence
  Description of Artificial Sequence: Synthetic oligonucleotide
ccacccccuccucccagg

SEQ ID NO: 1211 - RNA, 18 nt, Artificial Sequence
  Description of Artificial Sequence: Synthetic oligonucleotide
auggaccacccccuccuc

SEQ ID NO: 1212 - RNA, 18 nt, Artificial Sequence
  Description of Artificial Sequence: Synthetic oligonucleotide
aagccauggaccaccccc

SEQ ID NO: 1213 - RNA, 18 nt, Artificial Sequence
  Description of Artificial Sequence: Synthetic oligonucleotide
accacaagccauggacca

SEQ ID NO: 1214 - RNA, 18 nt, Artificial Sequence
  Description of Artificial Sequence: Synthetic oligonucleotide
cccacaccacaagccaug

SEQ ID NO: 1215 - RNA, 18 nt, Artificial Sequence
  Description of Artificial Sequence: Synthetic oligonucleotide
gccagcccacaccacaag

SEQ ID NO: 1216 - RNA, 18 nt, Artificial Sequence
  Description of Artificial Sequence: Synthetic oligonucleotide
cuauagccagcccacacc

SEQ ID NO: 1217 - RNA, 18 nt, Artificial Sequence
  Description of Artificial Sequence: Synthetic oligonucleotide
cuccccuauagccagccc

SEQ ID NO: 1218 - RNA, 18 nt, Artificial Sequence
  Description of Artificial Sequence: Synthetic oligonucleotide
guggccuccccuauagcc

SEQ ID NO: 1219 - RNA, 18 nt, Artificial Sequence
  Description of Artificial Sequence: Synthetic oligonucleotide
uagcaguggccuccccua

SEQ ID NO: 1220 - RNA, 18 nt, Artificial Sequence
  Description of Artificial Sequence: Synthetic oligonucleotide
uccccuagcaguggccuc

SEQ ID NO: 1221 - RNA, 18 nt, Artificial Sequence
  Description of Artificial Sequence: Synthetic oligonucleotide
gccaguccccuagcagug

SEQ ID NO: 1222 - RNA, 18 nt, Artificial Sequence
  Description of Artificial Sequence: Synthetic oligonucleotide
uggaugccaguccccuag

SEQ ID NO: 1223 - RNA, 18 nt, Artificial Sequence
  Description of Artificial Sequence: Synthetic oligonucleotide
gggccuggaugccagucc

SEQ ID NO: 1224 - RNA, 18 nt, Artificial Sequence
  Description of Artificial Sequence: Synthetic oligonucleotide
auugagacgcuucaaggg

SEQ ID NO: 1225 - RNA, 18 nt, Artificial Sequence
  Description of Artificial Sequence: Synthetic oligonucleotide
uuauugagacgcuucaag

SEQ ID NO: 1226 - RNA, 18 nt, Artificial Sequence
  Description of Artificial Sequence: Synthetic oligonucleotide
cggacuuauugagacgcu

SEQ ID NO: 1227 - RNA, 18 nt, Artificial Sequence
  Description of Artificial Sequence: Synthetic oligonucleotide
gagcgcggacuuauugag

SEQ ID NO: 1228 - RNA, 18 nt, Artificial Sequence
  Description of Artificial Sequence: Synthetic oligonucleotide
aaggagagcgcggacuua

SEQ ID NO: 1229 - RNA, 18 nt, Artificial Sequence
  Description of Artificial Sequence: Synthetic oligonucleotide
gguuuguuggacccaagg

SEQ ID NO: 1230 - RNA, 18 nt, Artificial Sequence
  Description of Artificial Sequence: Synthetic oligonucleotide
acgcggguuuguuggacc

SEQ ID NO: 1231 - RNA, 18 nt, Artificial Sequence
  Description of Artificial Sequence: Synthetic oligonucleotide
gucacacgcggguuuguu

SEQ ID NO: 1232 - RNA, 18 nt, Artificial Sequence
  Description of Artificial Sequence: Synthetic oligonucleotide
ccagcgucacacgcgggu

SEQ ID NO: 1233 - RNA, 18 nt, Artificial Sequence
  Description of Artificial Sequence: Synthetic oligonucleotide
gggccagcgucacacgcg

SEQ ID NO: 1234 - RNA, 18 nt, Artificial Sequence
  Description of Artificial Sequence: Synthetic oligonucleotide
aggccauuccacgguggg

SEQ ID NO: 1235 - RNA, 18 nt, Artificial Sequence
  Description of Artificial Sequence: Synthetic oligonucleotide
gggccaggccauuccacg

SEQ ID NO: 1236 - RNA, 18 nt, Artificial Sequence
  Description of Artificial Sequence: Synthetic oligonucleotide
uccguaaucugcagccgg

SEQ ID NO: 1237 - RNA, 18 nt, Artificial Sequence
  Description of Artificial Sequence: Synthetic oligonucleotide
cguucuccguaaucugca

SEQ ID NO: 1238 - RNA, 18 nt, Artificial Sequence
  Description of Artificial Sequence: Synthetic oligonucleotide
cucgccguucuccguaau

SEQ ID NO: 1239 - RNA, 18 nt, Artificial Sequence
  Description of Artificial Sequence: Synthetic oligonucleotide
cggaacucgccguucucc

SEQ ID NO: 1240 - RNA, 18 nt, Artificial Sequence
  Description of Artificial Sequence: Synthetic oligonucleotide
uguuucggaacucgccgu

SEQ ID NO: 1241 - RNA, 18 nt, Artificial Sequence
  Description of Artificial Sequence: Synthetic oligonucleotide
ugcgguguuucggaacuc

SEQ ID NO: 1242 - RNA, 18 nt, Artificial Sequence
  Description of Artificial Sequence: Synthetic oligonucleotide
uggucugcgguguuucgg

SEQ ID NO: 1243 - RNA, 18 nt, Artificial Sequence
  Description of Artificial Sequence: Synthetic oligonucleotide
gcuaguggucugcggugu

SEQ ID NO: 1244 - RNA, 18 nt, Artificial Sequence
  Description of Artificial Sequence: Synthetic oligonucleotide
ggugggcuaguggucugc

SEQ ID NO: 1245 - RNA, 18 nt, Artificial Sequence
  Description of Artificial Sequence: Synthetic oligonucleotide
ugcugggugggcuagugg

SEQ ID NO: 1246 - RNA, 18 nt, Artificial Sequence
  Description of Artificial Sequence: Synthetic oligonucleotide
ucugaugcugggugggcu

SEQ ID NO: 1247 - RNA, 18 nt, Artificial Sequence
  Description of Artificial Sequence: Synthetic oligonucleotide
aggucucugaugcugggu

SEQ ID NO: 1248 - RNA, 18 nt, Artificial Sequence
  Description of Artificial Sequence: Synthetic oligonucleotide
agagaaggucucugaugc

SEQ ID NO: 1249 - RNA, 18 nt, Artificial Sequence
  Description of Artificial Sequence: Synthetic oligonucleotide
aaggaagagaaggucucu

SEQ ID NO: 1250 - RNA, 18 nt, Artificial Sequence
  Description of Artificial Sequence: Synthetic oligonucleotide
caggaaaggaagagaagg

SEQ ID NO: 1251 - RNA, 18 nt, Artificial Sequence
  Description of Artificial Sequence: Synthetic oligonucleotide
gugcacaggaaaggaaga

SEQ ID NO: 1252 - RNA, 18 nt, Artificial Sequence
  Description of Artificial Sequence: Synthetic oligonucleotide
gggugcacaggaaaggaa

SEQ ID NO: 1253 - RNA, 18 nt, Artificial Sequence
  Description of Artificial Sequence: Synthetic oligonucleotide
gugcuguuacaggguggg

SEQ ID NO: 1254 - RNA, 18 nt, Artificial Sequence
  Description of Artificial Sequence: Synthetic oligonucleotide
gguuggugcuguuacagg

SEQ ID NO: 1255 - RNA, 18 nt, Artificial Sequence
  Description of Artificial Sequence: Synthetic oligonucleotide
cuggugguuggugcuguu

SEQ ID NO: 1256 - RNA, 18 nt, Artificial Sequence
  Description of Artificial Sequence: Synthetic oligonucleotide
caauccuggugguuggug

SEQ ID NO: 1257 - RNA, 18 nt, Artificial Sequence
  Description of Artificial Sequence: Synthetic oligonucleotide
auguccaauccugguggu

SEQ ID NO: 1258 - RNA, 18 nt, Artificial Sequence
  Description of Artificial Sequence: Synthetic oligonucleotide
cggugauguccaauccug

SEQ ID NO: 1259 - RNA, 18 nt, Artificial Sequence
  Description of Artificial Sequence: Synthetic oligonucleotide
uuccucggugauguccaa

SEQ ID NO: 1260 - RNA, 18 nt, Artificial Sequence
  Description of Artificial Sequence: Synthetic oligonucleotide
cgcuguuccucggugaug

SEQ ID NO: 1261 - RNA, 18 nt, Artificial Sequence
  Description of Artificial Sequence: Synthetic oligonucleotide
aaucccgcuguuccucgg

SEQ ID NO: 1262 - RNA, 18 nt, Artificial Sequence
  Description of Artificial Sequence: Synthetic oligonucleotide
gaggcaaucccgcuguuc

SEQ ID NO: 1263 - RNA, 18 nt, Artificial Sequence
  Description of Artificial Sequence: Synthetic oligonucleotide
gggaggcaaucccgcugu

SEQ ID NO: 1264 - RNA, 18 nt, Artificial Sequence
  Description of Artificial Sequence: Synthetic oligonucleotide
cccagggaggcauucggg

SEQ ID NO: 1265 - RNA, 18 nt, Artificial Sequence
  Description of Artificial Sequence: Synthetic oligonucleotide
ugccucccagggaggcau

SEQ ID NO: 1266 - RNA, 18 nt, Artificial Sequence
  Description of Artificial Sequence: Synthetic oligonucleotide
cagugugccucccaggga

SEQ ID NO: 1267 - RNA, 18 nt, Artificial Sequence
  Description of Artificial Sequence: Synthetic oligonucleotide
gcaaucagugugccuccc

SEQ ID NO: 1268 - RNA, 18 nt, Artificial Sequence
  Description of Artificial Sequence: Synthetic oligonucleotide
ggugggcaaucagugugc

SEQ ID NO: 1269 - RNA, 18 nt, Artificial Sequence
  Description of Artificial Sequence: Synthetic oligonucleotide
gggugggcaaucagugug

SEQ ID NO: 1270 - RNA, 18 nt, Artificial Sequence
  Description of Artificial Sequence: Synthetic oligonucleotide
aaauggugcagugguggg

SEQ ID NO: 1271 - RNA, 18 nt, Artificial Sequence
  Description of Artificial Sequence: Synthetic oligonucleotide
ccuggaaauggugcagug

SEQ ID NO: 1272 - RNA, 18 nt, Artificial Sequence
  Description of Artificial Sequence: Synthetic oligonucleotide
ucccuccuggaaauggug

SEQ ID NO: 1273 - RNA, 18 nt, Artificial Sequence
  Description of Artificial Sequence: Synthetic oligonucleotide
cacucucccuccuggaaa

SEQ ID NO: 1274 - RNA, 18 nt, Artificial Sequence
  Description of Artificial Sequence: Synthetic oligonucleotide
guccccacucucccuccu

SEQ ID NO: 1275 - RNA, 18 nt, Artificial Sequence
  Description of Artificial Sequence: Synthetic oligonucleotide
ugaggguccccacucucc

SEQ ID NO: 1276 - RNA, 18 nt, Artificial Sequence
  Description of Artificial Sequence: Synthetic oligonucleotide
gcggcugaggguccccac

SEQ ID NO: 1277 - RNA, 18 nt, Artificial Sequence
  Description of Artificial Sequence: Synthetic oligonucleotide
gggcggcugagggucccc

SEQ ID NO: 1278 - RNA, 18 nt, Artificial Sequence
  Description of Artificial Sequence: Synthetic oligonucleotide
caaugggaaggaaaaggg

SEQ ID NO: 1279 - RNA, 18 nt, Artificial Sequence
  Description of Artificial Sequence: Synthetic oligonucleotide
caccccaaugggaaggaa

SEQ ID NO: 1280 - RNA, 18 nt, Artificial Sequence
  Description of Artificial Sequence: Synthetic oligonucleotide
ggcagcaccccaauggga

SEQ ID NO: 1281 - RNA, 18 nt, Artificial Sequence
  Description of Artificial Sequence: Synthetic oligonucleotide
gagagggcagcaccccaa

SEQ ID NO: 1282 - RNA, 18 nt, Artificial Sequence
  Description of Artificial Sequence: Synthetic oligonucleotide
ucaaagagagggcagcac

SEQ ID NO: 1283 - RNA, 18 nt, Artificial Sequence
  Description of Artificial Sequence: Synthetic oligonucleotide
gggucaaagagagggcag

SEQ ID NO: 1284 - RNA, 18 nt, Artificial Sequence
  Description of Artificial Sequence: Synthetic oligonucleotide
gguaggcgguguccuggg

SEQ ID NO: 1285 - RNA, 18 nt, Artificial Sequence
  Description of Artificial Sequence: Synthetic oligonucleotide
ggguaggcgguguccugg

SEQ ID NO: 1286 - RNA, 18 nt, Artificial Sequence
  Description of Artificial Sequence: Synthetic oligonucleotide
gcaccccggagugaaggg

SEQ ID NO: 1287 - RNA, 18 nt, Artificial Sequence
  Description of Artificial Sequence: Synthetic oligonucleotide
ggauagcaccccggagug

SEQ ID NO: 1288 - RNA, 18 nt, Artificial Sequence
  Description of Artificial Sequence: Synthetic oligonucleotide
gggauagcaccccggagu

SEQ ID NO: 1289 - RNA, 18 nt, Artificial Sequence
  Description of Artificial Sequence: Synthetic oligonucleotide
gaugaggcagaggauggg

SEQ ID NO: 1290 - RNA, 18 nt, Artificial Sequence
  Description of Artificial Sequence: Synthetic oligonucleotide
ggaacgaugaggcagagg

SEQ ID NO: 1291 - RNA, 18 nt, Artificial Sequence
  Description of Artificial Sequence: Synthetic oligonucleotide
gggaacgaugaggcagag

SEQ ID NO: 1292 - RNA, 18 nt, Artificial Sequence
  Description of Artificial Sequence: Synthetic oligonucleotide
gucccccagugcucaggg

SEQ ID NO: 1293 - RNA, 18 nt, Artificial Sequence
  Description of Artificial Sequence: Synthetic oligonucleotide
ggucugucccccagugcu

SEQ ID NO: 1294 - RNA, 18 nt, Artificial Sequence
  Description of Artificial Sequence: Synthetic oligonucleotide
gugagggucuguccccca

SEQ ID NO: 1295 - RNA, 18 nt, Artificial Sequence
  Description of Artificial Sequence: Synthetic oligonucleotide
gggugagggucugucccc

SEQ ID NO: 1296 - RNA, 18 nt, Artificial Sequence
  Description of Artificial Sequence: Synthetic oligonucleotide
ccacacccccaggguggg

SEQ ID NO: 1297 - RNA, 18 nt, Artificial Sequence
  Description of Artificial Sequence: Synthetic oligonucleotide
aggugccacacccccagg

SEQ ID NO: 1298 - RNA, 18 nt, Artificial Sequence
  Description of Artificial Sequence: Synthetic oligonucleotide
uuuggaggugccacaccc

SEQ ID NO: 1299 - RNA, 18 nt, Artificial Sequence
  Description of Artificial Sequence: Synthetic oligonucleotide
gaaaguuuggaggugcca

SEQ ID NO: 1300 - RNA, 18 nt, Artificial Sequence
  Description of Artificial Sequence: Synthetic oligonucleotide
aaguugaaaguuuggagg

SEQ ID NO: 1301 - RNA, 18 nt, Artificial Sequence
  Description of Artificial Sequence: Synthetic oligonucleotide
cccugaaguugaaaguuu

SEQ ID NO: 1302 - RNA, 18 nt, Artificial Sequence
  Description of Artificial Sequence: Synthetic oligonucleotide
aaucacccugaaguugaa

SEQ ID NO: 1303 - RNA, 18 nt, Artificial Sequence
  Description of Artificial Sequence: Synthetic oligonucleotide
aaaaaaaucacccugaag

SEQ ID NO: 1304 - RNA, 18 nt, Artificial Sequence
  Description of Artificial Sequence: Synthetic oligonucleotide
cugcuaaaaaaaucaccc

SEQ ID NO: 1305 - RNA, 18 nt, Artificial Sequence
  Description of Artificial Sequence: Synthetic oligonucleotide
gguuacugcuaaaaaaau

SEQ ID NO: 1306 - RNA, 18 nt, Artificial Sequence
  Description of Artificial Sequence: Synthetic oligonucleotide
gcucugguuacugcuaaa

SEQ ID NO: 1307 - RNA, 18 nt, Artificial Sequence
  Description of Artificial Sequence: Synthetic oligonucleotide
ugucagcucugguuacug

SEQ ID NO: 1308 - RNA, 18 nt, Artificial Sequence
  Description of Artificial Sequence: Synthetic oligonucleotide
uagauugucagcucuggu

SEQ ID NO: 1309 - RNA, 18 nt, Artificial Sequence
  Description of Artificial Sequence: Synthetic oligonucleotide
ggaguuagauugucagcu

SEQ ID NO: 1310 - RNA, 18 nt, Artificial Sequence
  Description of Artificial Sequence: Synthetic oligonucleotide
gggaguuagauugucagc

SEQ ID NO: 1311 - RNA, 18 nt, Artificial Sequence
  Description of Artificial Sequence: Synthetic oligonucleotide
cccuccccauaacaaggg

SEQ ID NO: 1312 - RNA, 18 nt, Artificial Sequence
  Description of Artificial Sequence: Synthetic oligonucleotide
ggguccccuccccauaac

SEQ ID NO: 1313 - RNA, 18 nt, Artificial Sequence
  Description of Artificial Sequence: Synthetic oligonucleotide
uaauagggcccccucacc

SEQ ID NO: 1314 - RNA, 18 nt, Artificial Sequence
  Description of Artificial Sequence: Synthetic oligonucleotide
ggguaauagggcccccuc

SEQ ID NO: 1315 - RNA, 18 nt, Artificial Sequence
  Description of Artificial Sequence: Synthetic oligonucleotide
cuccugagaaaucaaggg

SEQ ID NO: 1316 - RNA, 18 nt, Artificial Sequence
  Description of Artificial Sequence: Synthetic oligonucleotide
agacgcuccugagaaauc

SEQ ID NO: 1317 - RNA, 18 nt, Artificial Sequence
  Description of Artificial Sequence: Synthetic oligonucleotide
cccccagacgcuccugag

SEQ ID NO: 1318 - RNA, 18 nt, Artificial Sequence
  Description of Artificial Sequence: Synthetic oligonucleotide
gagcccccccagacgcuc

SEQ ID NO: 1319 - RNA, 18 nt, Artificial Sequence
  Description of Artificial Sequence: Synthetic oligonucleotide
gugcugagcccccccaga

SEQ ID NO: 1320 - RNA, 18 nt, Artificial Sequence
  Description of Artificial Sequence: Synthetic oligonucleotide
ugugcgugcugagccccc

SEQ ID NO: 1321 - RNA, 18 nt, Artificial Sequence
  Description of Artificial Sequence: Synthetic oligonucleotide
gaguuugugcgugcugag

SEQ ID NO: 1322 - RNA, 18 nt, Artificial Sequence
  Description of Artificial Sequence: Synthetic oligonucleotide
agaaggaguuugugcgug

SEQ ID NO: 1323 - RNA, 18 nt, Artificial Sequence
  Description of Artificial Sequence: Synthetic oligonucleotide
gaaggagaaggaguuugu

SEQ ID NO: 1324 - RNA, 18 nt, Artificial Sequence
  Description of Artificial Sequence: Synthetic oligonucleotide
ugguagaaggagaaggag

SEQ ID NO: 1325 - RNA, 18 nt, Artificial Sequence
  Description of Artificial Sequence: Synthetic oligonucleotide
aagagugguagaaggaga

SEQ ID NO: 1326 - RNA, 18 nt, Artificial Sequence
  Description of Artificial Sequence: Synthetic oligonucleotide
aauuuaagagugguagaa

SEQ ID NO: 1327 - RNA, 18 nt, Artificial Sequence
  Description of Artificial Sequence: Synthetic oligonucleotide
gaguaaauuuaagagugg

SEQ ID NO: 1328 - RNA, 18 nt, Artificial Sequence
  Description of Artificial Sequence: Synthetic oligonucleotide
ggagggaguaaauuuaag

SEQ ID NO: 1329 - RNA, 18 nt, Artificial Sequence
  Description of Artificial Sequence: Synthetic oligonucleotide
gggagggaguaaauuuaa

SEQ ID NO: 1330 - RNA, 18 nt, Artificial Sequence
  Description of Artificial Sequence: Synthetic oligonucleotide
aucuggguucuggguggg

SEQ ID NO: 1331 - RNA, 18 nt, Artificial Sequence
  Description of Artificial Sequence: Synthetic oligonucleotide
accccaucuggguucugg

SEQ ID NO: 1332 - RNA, 18 nt, Artificial Sequence
  Description of Artificial Sequence: Synthetic oligonucleotide
ccuccaccccaucugggu

SEQ ID NO: 1333 - RNA, 18 nt, Artificial Sequence
  Description of Artificial Sequence: Synthetic oligonucleotide
ggcccccuccaccccauc

SEQ ID NO: 1334 - RNA, 18 nt, Artificial Sequence
  Description of Artificial Sequence: Synthetic oligonucleotide
ccgguggcccccuccacc

SEQ ID NO: 1335 - RNA, 18 nt, Artificial Sequence
  Description of Artificial Sequence: Synthetic oligonucleotide
cugccccgguggcccccu

SEQ ID NO: 1336 - RNA, 18 nt, Artificial Sequence
  Description of Artificial Sequence: Synthetic oligonucleotide
ccucccugccccgguggc

SEQ ID NO: 1337 - RNA, 18 nt, Artificial Sequence
  Description of Artificial Sequence: Synthetic oligonucleotide
cgcccccucccugccccg

SEQ ID NO: 1338 - RNA, 18 nt, Artificial Sequence
  Description of Artificial Sequence: Synthetic oligonucleotide
cuugccgcccccucccug

SEQ ID NO: 1339 - RNA, 18 nt, Artificial Sequence
  Description of Artificial Sequence: Synthetic oligonucleotide
ccccccuugccgcccccu

SEQ ID NO: 1340 - RNA, 18 nt, Artificial Sequence
  Description of Artificial Sequence: Synthetic oligonucleotide
ccauuccccccuugccgc

SEQ ID NO: 1341 - RNA, 18 nt, Artificial Sequence
  Description of Artificial Sequence: Synthetic oligonucleotide
aacucccauuccccccuu

SEQ ID NO: 1342 - RNA, 18 nt, Artificial Sequence
  Description of Artificial Sequence: Synthetic oligonucleotide
gagacaacucccauuccc

SEQ ID NO: 1343 - RNA, 18 nt, Artificial Sequence
  Description of Artificial Sequence: Synthetic oligonucleotide
gggagacaacucccauuc

SEQ ID NO: 1344 - RNA, 18 nt, Artificial Sequence
  Description of Artificial Sequence: Synthetic oligonucleotide
gagcagaucagguguggg

SEQ ID NO: 1345 - RNA, 18 nt, Artificial Sequence
  Description of Artificial Sequence: Synthetic oligonucleotide
gccgagagcagaucaggu

SEQ ID NO: 1346 - RNA, 18 nt, Artificial Sequence
  Description of Artificial Sequence: Synthetic oligonucleotide
gaccagccgagagcagau

SEQ ID NO: 1347 - RNA, 18 nt, Artificial Sequence
  Description of Artificial Sequence: Synthetic oligonucleotide
ucugggaccagccgagag

SEQ ID NO: 1348 - RNA, 18 nt, Artificial Sequence
  Description of Artificial Sequence: Synthetic oligonucleotide
cccgcucugggaccagcc

SEQ ID NO: 1349 - RNA, 18 nt, Artificial Sequence
  Description of Artificial Sequence: Synthetic oligonucleotide
cucaccccgcucugggac

SEQ ID NO: 1350 - RNA, 18 nt, Artificial Sequence
  Description of Artificial Sequence: Synthetic oligonucleotide
gcccccucaccccgcucu

SEQ ID NO: 1351 - RNA, 18 nt, Artificial Sequence
  Description of Artificial Sequence: Synthetic oligonucleotide
cauaagcccccucacccc

SEQ ID NO: 1352 - RNA, 18 nt, Artificial Sequence
  Description of Artificial Sequence: Synthetic oligonucleotide
gggcauaagcccccucac

SEQ ID NO: 1353 - RNA, 18 nt, Artificial Sequence
  Description of Artificial Sequence: Synthetic oligonucleotide
cccacccaacacacuggg

SEQ ID NO: 1354 - RNA, 18 nt, Artificial Sequence
  Description of Artificial Sequence: Synthetic oligonucleotide
uccaccccacccaacaca

SEQ ID NO: 1355 - RNA, 18 nt, Artificial Sequence
  Description of Artificial Sequence: Synthetic oligonucleotide
ucaauuccaccccaccca

SEQ ID NO: 1356 - RNA, 18 nt, Artificial Sequence
  Description of Artificial Sequence: Synthetic oligonucleotide
uaaccucaauuccacccc

SEQ ID NO: 1357 - RNA, 18 nt, Artificial Sequence
  Description of Artificial Sequence: Synthetic oligonucleotide
cacccuaaccucaauucc

SEQ ID NO: 1358 - RNA, 18 nt, Artificial Sequence
  Description of Artificial Sequence: Synthetic oligonucleotide
ccccucacccuaaccuca

SEQ ID NO: 1359 - RNA, 18 nt, Artificial Sequence
  Description of Artificial Sequence: Synthetic oligonucleotide
ccugaccccucacccuaa

SEQ ID NO: 1360 - RNA, 18 nt, Artificial Sequence
  Description of Artificial Sequence: Synthetic oligonucleotide
uaaacccugaccccucac

SEQ ID NO: 1361 - RNA, 18 nt, Artificial Sequence
  Description of Artificial Sequence: Synthetic oligonucleotide
ccuccuaaacccugaccc

SEQ ID NO: 1362 - RNA, 18 nt, Artificial Sequence
  Description of Artificial Sequence: Synthetic oligonucleotide
cacacccuccuaaacccu

SEQ ID NO: 1363 - RNA, 18 nt, Artificial Sequence
  Description of Artificial Sequence: Synthetic oligonucleotide
acauacacacccuccuaa

SEQ ID NO: 1364 - RNA, 18 nt, Artificial Sequence
  Description of Artificial Sequence: Synthetic oligonucleotide
ucccaacauacacacccu

SEQ ID NO: 1365 - RNA, 18 nt, Artificial Sequence
  Description of Artificial Sequence: Synthetic oligonucleotide
uguccucccaacauacac

SEQ ID NO: 1366 - RNA, 18 nt, Artificial Sequence
  Description of Artificial Sequence: Synthetic oligonucleotide
uagccuguccucccaaca

SEQ ID NO: 1367 - RNA, 18 nt, Artificial Sequence
  Description of Artificial Sequence: Synthetic oligonucleotide
ucaacuagccuguccucc

SEQ ID NO: 1368 - RNA, 18 nt, Artificial Sequence
  Description of Artificial Sequence: Synthetic oligonucleotide
acagaucaacuagccugu

SEQ ID NO: 1369 - RNA, 18 nt, Artificial Sequence
  Description of Artificial Sequence: Synthetic oligonucleotide
guaggacagaucaacuag

SEQ ID NO: 1370 - RNA, 18 nt, Artificial Sequence
  Description of Artificial Sequence: Synthetic oligonucleotide
ucagaguaggacagauca

SEQ ID NO: 1371 - RNA, 18 nt, Artificial Sequence
  Description of Artificial Sequence: Synthetic oligonucleotide
gugugucagaguaggaca

SEQ ID NO: 1372 - RNA, 18 nt, Artificial Sequence
  Description of Artificial Sequence: Synthetic oligonucleotide
ggacugugugucagagua

SEQ ID NO: 1373 - RNA, 18 nt, Artificial Sequence
  Description of Artificial Sequence: Synthetic oligonucleotide
gggacugugugucagagu

SEQ ID NO: 1374 - RNA, 18 nt, Artificial Sequence
  Description of Artificial Sequence: Synthetic oligonucleotide
agaagagagaaggaaggg

SEQ ID NO: 1375 - RNA, 18 nt, Artificial Sequence
  Description of Artificial Sequence: Synthetic oligonucleotide
gaccaagaagagagaagg

SEQ ID NO: 1376 - RNA, 18 nt, Artificial Sequence
  Description of Artificial Sequence: Synthetic oligonucleotide
guagagaccaagaagaga

SEQ ID NO: 1377 - RNA, 18 nt, Artificial Sequence
  Description of Artificial Sequence: Synthetic oligonucleotide
ugggaguagagaccaaga

SEQ ID NO: 1378 - RNA, 18 nt, Artificial Sequence
  Description of Artificial Sequence: Synthetic oligonucleotide
cccccugggaguagagac

SEQ ID NO: 1379 - RNA, 18 nt, Artificial Sequence
  Description of Artificial Sequence: Synthetic oligonucleotide
ccccucccccugggagua

SEQ ID NO: 1380 - RNA, 18 nt, Artificial Sequence
  Description of Artificial Sequence: Synthetic oligonucleotide
guuccccccucccccugg

SEQ ID NO: 1381 - RNA, 18 nt, Artificial Sequence
  Description of Artificial Sequence: Synthetic oligonucleotide
aguaaguuccccccuccc

SEQ ID NO: 1382 - RNA, 18 nt, Artificial Sequence
  Description of Artificial Sequence: Synthetic oligonucleotide
ccuagaguaaguuccccc

SEQ ID NO: 1383 - RNA, 18 nt, Artificial Sequence
  Description of Artificial Sequence: Synthetic oligonucleotide
cuuuuccuagaguaaguu

SEQ ID NO: 1384 - RNA, 18 nt, Artificial Sequence
  Description of Artificial Sequence: Synthetic oligonucleotide
cauggcuuuuccuagagu

SEQ ID NO: 1385 - RNA, 18 nt, Artificial Sequence
  Description of Artificial Sequence: Synthetic oligonucleotide
agagacauggcuuuuccu

SEQ ID NO: 1386 - RNA, 18 nt, Artificial Sequence
  Description of Artificial Sequence: Synthetic oligonucleotide
gggagagagacauggcuu

SEQ ID NO: 1387 - RNA, 18 nt, Artificial Sequence
  Description of Artificial Sequence: Synthetic oligonucleotide
cacagguccccccacccu

SEQ ID NO: 1388 - RNA, 18 nt, Artificial Sequence
  Description of Artificial Sequence: Synthetic oligonucleotide
uccaacacaggucccccc

SEQ ID NO: 1389 - RNA, 18 nt, Artificial Sequence
  Description of Artificial Sequence: Synthetic oligonucleotide
ccuccuccaacacagguc

SEQ ID NO: 1390 - RNA, 18 nt, Artificial Sequence
  Description of Artificial Sequence: Synthetic oligonucleotide
acaccccuccuccaacac

SEQ ID NO: 1391 - RNA, 18 nt, Artificial Sequence
  Description of Artificial Sequence: Synthetic oligonucleotide
ccccaacaccccuccucc

SEQ ID NO: 1392 - RNA, 18 nt, Artificial Sequence
  Description of Artificial Sequence: Synthetic oligonucleotide
gggccccccaacaccccu

SEQ ID NO: 1393 - RNA, 18 nt, Artificial Sequence
  Description of Artificial Sequence: Synthetic oligonucleotide
gggacagagucauggaag

SEQ ID NO: 1394 - RNA, 18 nt, Artificial Sequence
  Description of Artificial Sequence: Synthetic oligonucleotide
guccuaccucccccaggg

SEQ ID NO: 1395 - RNA, 18 nt, Artificial Sequence
  Description of Artificial Sequence: Synthetic oligonucleotide
gcccuguccuaccucccc

SEQ ID NO: 1396 - RNA, 18 nt, Artificial Sequence
  Description of Artificial Sequence: Synthetic oligonucleotide
gcccagcccuguccuacc

SEQ ID NO: 1397 - RNA, 18 nt, Artificial Sequence
  Description of Artificial Sequence: Synthetic oligonucleotide
gggaagcccagcccuguc

SEQ ID NO: 1398 - RNA, 18 nt, Artificial Sequence
  Description of Artificial Sequence: Synthetic oligonucleotide
ugagagggaagcccagcc

SEQ ID NO: 1399 - RNA, 18 nt, Artificial Sequence
  Description of Artificial Sequence: Synthetic oligonucleotide
gaggaugagagggaagcc

SEQ ID NO: 1400 - RNA, 18 nt, Artificial Sequence
  Description of Artificial Sequence: Synthetic oligonucleotide
gggaggaugagagggaag

SEQ ID NO: 1401 - RNA, 18 nt, Artificial Sequence
  Description of Artificial Sequence: Synthetic oligonucleotide
ggaaggagauugggaggg

SEQ ID NO: 1402 - RNA, 18 nt, Artificial Sequence
  Description of Artificial Sequence: Synthetic oligonucleotide
gagguggaaggagauugg

SEQ ID NO: 1403 - RNA, 18 nt, Artificial Sequence
  Description of Artificial Sequence: Synthetic oligonucleotide
ggagggagguggaaggag

SEQ ID NO: 1404 - RNA, 18 nt, Artificial Sequence
  Description of Artificial Sequence: Synthetic oligonucleotide
gggagggagggaggugga

SEQ ID NO: 1405 - RNA, 18 nt, Artificial Sequence
  Description of Artificial Sequence: Synthetic oligonucleotide
cuggcgggagggagggag

SEQ ID NO: 1406 - RNA, 18 nt, Artificial Sequence
  Description of Artificial Sequence: Synthetic oligonucleotide
uggagcuggcgggaggga

SEQ ID NO: 1407 - RNA, 18 nt, Artificial Sequence
  Description of Artificial Sequence: Synthetic oligonucleotide
aaucguggagcuggcggg

SEQ ID NO: 1408 - RNA, 18 nt, Artificial Sequence
  Description of Artificial Sequence: Synthetic oligonucleotide
cgaaaaaucguggagcug

SEQ ID NO: 1409 - RNA, 18 nt, Artificial Sequence
  Description of Artificial Sequence: Synthetic oligonucleotide
aacaccgaaaaaucgugg

SEQ ID NO: 1410 - RNA, 18 nt, Artificial Sequence
  Description of Artificial Sequence: Synthetic oligonucleotide
agagaaacaccgaaaaau

SEQ ID NO: 1411 - RNA, 18 nt, Artificial Sequence
  Description of Artificial Sequence: Synthetic oligonucleotide
uguacagagaaacaccga

SEQ ID NO: 1412 - RNA, 18 nt, Artificial Sequence
  Description of Artificial Sequence: Synthetic oligonucleotide
aacuauguacagagaaac

SEQ ID NO: 1413 - RNA, 18 nt, Artificial Sequence
  Description of Artificial Sequence: Synthetic oligonucleotide
cagaaaacuauguacaga

SEQ ID NO: 1414 - RNA, 18 nt, Artificial Sequence
  Description of Artificial Sequence: Synthetic oligonucleotide
cccgccagaaaacuaugu

SEQ ID NO: 1415 - RNA, 18 nt, Artificial Sequence
  Description of Artificial Sequence: Synthetic oligonucleotide
ccuaucccgccagaaaac

SEQ ID NO: 1416 - RNA, 18 nt, Artificial Sequence
  Description of Artificial Sequence: Synthetic oligonucleotide
ccuccccuaucccgccag

SEQ ID NO: 1417 - RNA, 18 nt, Artificial Sequence
  Description of Artificial Sequence: Synthetic oligonucleotide
uccuaccuccccuauccc

SEQ ID NO: 1418 - RNA, 18 nt, Artificial Sequence
  Description of Artificial Sequence: Synthetic oligonucleotide
auccauccuaccuccccu

SEQ ID NO: 1419 - RNA, 18 nt, Artificial Sequence
  Description of Artificial Sequence: Synthetic oligonucleotide
accccauccauccuaccu

SEQ ID NO: 1420 - RNA, 18 nt, Artificial Sequence
  Description of Artificial Sequence: Synthetic oligonucleotide
cccaaaccccauccaucc

SEQ ID NO: 1421 - RNA, 18 nt, Artificial Sequence
  Description of Artificial Sequence: Synthetic oligonucleotide
cccaccccaaaccccauc

SEQ ID NO: 1422 - RNA, 18 nt, Artificial Sequence
  Description of Artificial Sequence: Synthetic oligonucleotide
gccuacccaccccaaacc

SEQ ID NO: 1423 - RNA, 18 nt, Artificial Sequence
  Description of Artificial Sequence: Synthetic oligonucleotide
ccauggccuacccacccc

SEQ ID NO: 1424 - RNA, 18 nt, Artificial Sequence
  Description of Artificial Sequence: Synthetic oligonucleotide
cccucccauggccuaccc

SEQ ID NO: 1425 - RNA, 18 nt, Artificial Sequence
  Description of Artificial Sequence: Synthetic oligonucleotide
uucuccccucccauggcc

SEQ ID NO: 1426 - RNA, 18 nt, Artificial Sequence
  Description of Artificial Sequence: Synthetic oligonucleotide
gggcuucuccccucccau

SEQ ID NO: 1427 - RNA, 18 nt, Artificial Sequence
  Description of Artificial Sequence: Synthetic oligonucleotide
agcagucagggaagaggg

SEQ ID NO: 1428 - RNA, 18 nt, Artificial Sequence
  Description of Artificial Sequence: Synthetic oligonucleotide
gggacagcagucagggaa

SEQ ID NO: 1429 - RNA, 18 nt, Artificial Sequence
  Description of Artificial Sequence: Synthetic oligonucleotide
gggcaaggcuggguaggg

SEQ ID NO: 1430 - RNA, 18 nt, Artificial Sequence
  Description of Artificial Sequence: Synthetic oligonucleotide
acgcaaaaggaugaaggg

SEQ ID NO: 1431 - RNA, 18 nt, Artificial Sequence
  Description of Artificial Sequence: Synthetic oligonucleotide
accaaacgcaaaaggaug

SEQ ID NO: 1432 - RNA, 18 nt, Artificial Sequence
  Description of Artificial Sequence: Synthetic oligonucleotide
ucaauaccaaacgcaaaa

SEQ ID NO: 1433 - RNA, 18 nt, Artificial Sequence
  Description of Artificial Sequence: Synthetic oligonucleotide
gagucucaauaccaaacg

SEQ ID NO: 1434 - RNA, 18 nt, Artificial Sequence
  Description of Artificial Sequence: Synthetic oligonucleotide
uaggagagucucaauacc

SEQ ID NO: 1435 - RNA, 18 nt, Artificial Sequence
  Description of Artificial Sequence: Synthetic oligonucleotide
gagucuaggagagucuca

SEQ ID NO: 1436 - RNA, 18 nt, Artificial Sequence
  Description of Artificial Sequence: Synthetic oligonucleotide
gaguagagucuaggagag

SEQ ID NO: 1437 - RNA, 18 nt, Artificial Sequence
  Description of Artificial Sequence: Synthetic oligonucleotide
aagaggaguagagucuag

SEQ ID NO: 1438 - RNA, 18 nt, Artificial Sequence
  Description of Artificial Sequence: Synthetic oligonucleotide
aaagaaagaggaguagag

SEQ ID NO: 1439 - RNA, 18 nt, Artificial Sequence
  Description of Artificial Sequence: Synthetic oligonucleotide
auacaaaagaaagaggag

SEQ ID NO: 1440 - RNA, 18 nt, Artificial Sequence
  Description of Artificial Sequence: Synthetic oligonucleotide
uguccauacaaaagaaag

SEQ ID NO: 1441 - RNA, 18 nt, Artificial Sequence
  Description of Artificial Sequence: Synthetic oligonucleotide
ggaacuguccauacaaaa

SEQ ID NO: 1442 - RNA, 18 nt, Artificial Sequence
  Description of Artificial Sequence: Synthetic oligonucleotide
gggaacuguccauacaaa

SEQ ID NO: 1443 - RNA, 18 nt, Artificial Sequence
  Description of Artificial Sequence: Synthetic oligonucleotide
cuggguguauguguaggg

SEQ ID NO: 1444 - RNA, 18 nt, Artificial Sequence
  Description of Artificial Sequence: Synthetic oligonucleotide
cccggcuggguguaugug

SEQ ID NO: 1445 - RNA, 18 nt, Artificial Sequence
  Description of Artificial Sequence: Synthetic oligonucleotide
uuggccccggcugggugu

SEQ ID NO: 1446 - RNA, 18 nt, Artificial Sequence
  Description of Artificial Sequence: Synthetic oligonucleotide
uaaauuuggccccggcug

SEQ ID NO: 1447 - RNA, 18 nt, Artificial Sequence
  Description of Artificial Sequence: Synthetic oligonucleotide
aaguauaaauuuggcccc

SEQ ID NO: 1448 - RNA, 18 nt, Artificial Sequence
  Description of Artificial Sequence: Synthetic oligonucleotide
uauauaaguauaaauuug

SEQ ID NO: 1449 - RNA, 18 nt, Artificial Sequence
  Description of Artificial Sequence: Synthetic oligonucleotide
acuuuuauauaaguauaa

SEQ ID NO: 1450 - RNA, 18 nt, Artificial Sequence
  Description of Artificial Sequence: Synthetic oligonucleotide
uuacaacuuuuauauaag

SEQ ID NO: 1451 - RNA, 18 nt, Artificial Sequence
  Description of Artificial Sequence: Synthetic oligonucleotide
cauauuuacaacuuuuau

SEQ ID NO: 1452 - RNA, 18 nt, Artificial Sequence
  Description of Artificial Sequence: Synthetic oligonucleotide
uuucacauauuuacaacu

SEQ ID NO: 1453 - RNA, 18 nt, Artificial Sequence
  Description of Artificial Sequence: Synthetic oligonucleotide
uaaaauuucacauauuua

SEQ ID NO: 1454 - RNA, 18 nt, Artificial Sequence
  Description of Artificial Sequence: Synthetic oligonucleotide
agggauaaaauuucacau

SEQ ID NO: 1455 - RNA, 18 nt, Artificial Sequence
  Description of Artificial Sequence: Synthetic oligonucleotide
ggcacagggauaaaauuu

SEQ ID NO: 1456 - RNA, 18 nt, Artificial Sequence
  Description of Artificial Sequence: Synthetic oligonucleotide
gaaagggcacagggauaa

SEQ ID NO: 1457 - RNA, 18 nt, Artificial Sequence
  Description of Artificial Sequence: Synthetic oligonucleotide
gggaaagggcacagggau

SEQ ID NO: 1458 - RNA, 18 nt, Artificial Sequence
  Description of Artificial Sequence: Synthetic oligonucleotide
gguagggccugagguggg

SEQ ID NO: 1459 - RNA, 18 nt, Artificial Sequence
  Description of Artificial Sequence: Synthetic oligonucleotide
ggguagggccugaggugg

SEQ ID NO: 1460 - RNA, 18 nt, Artificial Sequence
  Description of Artificial Sequence: Synthetic oligonucleotide
gagagaaggaagguuggg

SEQ ID NO: 1461 - RNA, 18 nt, Artificial Sequence
  Description of Artificial Sequence: Synthetic oligonucleotide
aagaagagagaaggaagg

SEQ ID NO: 1462 - RNA, 18 nt, Artificial Sequence
  Description of Artificial Sequence: Synthetic oligonucleotide
agccaaagaagagagaag

SEQ ID NO: 1463 - RNA, 18 nt, Artificial Sequence
  Description of Artificial Sequence: Synthetic oligonucleotide
acaacagccaaagaagag

SEQ ID NO: 1464 - RNA, 18 nt, Artificial Sequence
  Description of Artificial Sequence: Synthetic oligonucleotide
uaauuacaacagccaaag

SEQ ID NO: 1465 - RNA, 18 nt, Artificial Sequence
  Description of Artificial Sequence: Synthetic oligonucleotide
ccagauaauuacaacagc

SEQ ID NO: 1466 - RNA, 18 nt, Artificial Sequence
  Description of Artificial Sequence: Synthetic oligonucleotide
aaaccccagauaauuaca

SEQ ID NO: 1467 - RNA, 18 nt, Artificial Sequence
  Description of Artificial Sequence: Synthetic oligonucleotide
aguacaaaccccagauaa

SEQ ID NO: 1468 - RNA, 18 nt, Artificial Sequence
  Description of Artificial Sequence: Synthetic oligonucleotide
uguacaguacaaacccca

SEQ ID NO: 1469 - RNA, 18 nt, Artificial Sequence
  Description of Artificial Sequence: Synthetic oligonucleotide
ggauauguacaguacaaa

SEQ ID NO: 1470 - RNA, 18 nt, Artificial Sequence
  Description of Artificial Sequence: Synthetic oligonucleotide
accccggauauguacagu

SEQ ID NO: 1471 - RNA, 18 nt, Artificial Sequence
  Description of Artificial Sequence: Synthetic oligonucleotide
cacacaccccggauaugu

SEQ ID NO: 1472 - RNA, 18 nt, Artificial Sequence
  Description of Artificial Sequence: Synthetic oligonucleotide
acacacacacaccccgga

SEQ ID NO: 1473 - RNA, 18 nt, Artificial Sequence
  Description of Artificial Sequence: Synthetic oligonucleotide
agcccacacacacacacc

SEQ ID NO: 1474 - RNA, 18 nt, Artificial Sequence
  Description of Artificial Sequence: Synthetic oligonucleotide
cccccagcccacacacac

SEQ ID NO: 1475 - RNA, 18 nt, Artificial Sequence
  Description of Artificial Sequence: Synthetic oligonucleotide
gguugcccccagcccaca

SEQ ID NO: 1476 - RNA, 18 nt, Artificial Sequence
  Description of Artificial Sequence: Synthetic oligonucleotide
agaaggguugcccccagc

SEQ ID NO: 1477 - RNA, 18 nt, Artificial Sequence
  Description of Artificial Sequence: Synthetic oligonucleotide
uguacagaaggguugccc

SEQ ID NO: 1478 - RNA, 18 nt, Artificial Sequence
  Description of Artificial Sequence: Synthetic oligonucleotide
agcucuguacagaagggu

SEQ ID NO: 1479 - RNA, 18 nt, Artificial Sequence
  Description of Artificial Sequence: Synthetic oligonucleotide
caggaagcucuguacaga

SEQ ID NO: 1480 - RNA, 18 nt, Artificial Sequence
  Description of Artificial Sequence: Synthetic oligonucleotide
gggccaggaagcucugua

SEQ ID NO: 1481 - RNA, 18 nt, Artificial Sequence
  Description of Artificial Sequence: Synthetic oligonucleotide
cuugaggugguggguggg

SEQ ID NO: 1482 - RNA, 18 nt, Artificial Sequence
  Description of Artificial Sequence: Synthetic oligonucleotide
cuacccuugagguggugg

SEQ ID NO: 1483 - RNA, 18 nt, Artificial Sequence
  Description of Artificial Sequence: Synthetic oligonucleotide
acucccuacccuugaggu

SEQ ID NO: 1484 - RNA, 18 nt, Artificial Sequence
  Description of Artificial Sequence: Synthetic oligonucleotide
gagcaacucccuacccuu

SEQ ID NO: 1485 - RNA, 18 nt, Artificial Sequence
  Description of Artificial Sequence: Synthetic oligonucleotide
aggaagagcaacucccua

SEQ ID NO: 1486 - RNA, 18 nt, Artificial Sequence
  Description of Artificial Sequence: Synthetic oligonucleotide
cagguaggaagagcaacu

SEQ ID NO: 1487 - RNA, 18 nt, Artificial Sequence
  Description of Artificial Sequence: Synthetic oligonucleotide
uaaaacagguaggaagag

SEQ ID NO: 1488 - RNA, 18 nt, Artificial Sequence
  Description of Artificial Sequence: Synthetic oligonucleotide
caaaauaaaacagguagg

SEQ ID NO: 1489 - RNA, 18 nt, Artificial Sequence
  Description of Artificial Sequence: Synthetic oligonucleotide
gaaaacaaaauaaaacag

SEQ ID NO: 1490 - RNA, 18 nt, Artificial Sequence
  Description of Artificial Sequence: Synthetic oligonucleotide
aacgagaaaacaaaauaa

SEQ ID NO: 1491 - RNA, 18 nt, Artificial Sequence
  Description of Artificial Sequence: Synthetic oligonucleotide
gggagaacgagaaaacaa

SEQ ID NO: 1492 - RNA, 18 nt, Artificial Sequence
  Description of Artificial Sequence: Synthetic oligonucleotide
gggagggagaacgagaaa

SEQ ID NO: 1493 - RNA, 18 nt, Artificial Sequence
  Description of Artificial Sequence: Synthetic oligonucleotide
gauaaggcugggaguggg

SEQ ID NO: 1494 - RNA, 18 nt, Artificial Sequence
  Description of Artificial Sequence: Synthetic oligonucleotide
ggauagauaaggcuggga

SEQ ID NO: 1495 - RNA, 18 nt, Artificial Sequence
  Description of Artificial Sequence: Synthetic oligonucleotide
gggauagauaaggcuggg

SEQ ID NO: 1496 - RNA, 18 nt, Artificial Sequence
  Description of Artificial Sequence: Synthetic oligonucleotide
ugggaguggagaaaaggg

SEQ ID NO: 1497 - RNA, 18 nt, Artificial Sequence
  Description of Artificial Sequence: Synthetic oligonucleotide
gggcugggaguggagaaa

SEQ ID NO: 1498 - RNA, 18 nt, Artificial Sequence
  Description of Artificial Sequence: Synthetic oligonucleotide
agaaaaaaaggaaauggg

SEQ ID NO: 1499 - RNA, 18 nt, Artificial Sequence
  Description of Artificial Sequence: Synthetic oligonucleotide
acuccagaaaaaaaggaa

SEQ ID NO: 1500 - RNA, 18 nt, Artificial Sequence
  Description of Artificial Sequence: Synthetic oligonucleotide
cacacacuccagaaaaaa

SEQ ID NO: 1501 - RNA, 18 nt, Artificial Sequence
  Description of Artificial Sequence: Synthetic oligonucleotide
uucaccacacacuccaga

SEQ ID NO: 1502 - RNA, 18 nt, Artificial Sequence
  Description of Artificial Sequence: Synthetic oligonucleotide
ucuguuucaccacacacu

SEQ ID NO: 1503 - RNA, 18 nt, Artificial Sequence
  Description of Artificial Sequence: Synthetic oligonucleotide
uuuuuucuguuucaccac

SEQ ID NO: 1504 - RNA, 18 nt, Artificial Sequence
  Description of Artificial Sequence: Synthetic oligonucleotide
cauguuuuuuucuguuuc

SEQ ID NO: 1505 - RNA, 18 nt, Artificial Sequence
  Description of Artificial Sequence: Synthetic oligonucleotide
uuaaacauguuuuuuucu

SEQ ID NO: 1506 - RNA, 18 nt, Artificial Sequence
  Description of Artificial Sequence: Synthetic oligonucleotide
guuuauuaaacauguuuu

SEQ ID NO: 1507 - RNA, 18 nt, Artificial Sequence
  Description of Artificial Sequence: Synthetic oligonucleotide
ucuccguuuauuaaacau

SEQ ID NO: 1508 - RNA, 18 nt, Artificial Sequence
  Description of Artificial Sequence: Synthetic oligonucleotide
aacaaucuccguuuauua

SEQ ID NO: 1509 - RNA, 18 nt, Artificial Sequence
  Description of Artificial Sequence: Synthetic oligonucleotide
aaaagaacaaucuccguu

SEQ ID NO: 1510 - RNA, 18 nt, Artificial Sequence
  Description of Artificial Sequence: Synthetic oligonucleotide
gcgagccauguccauaga

SEQ ID NO: 1511 - RNA, 18 nt, Artificial Sequence
  Description of Artificial Sequence: Synthetic oligonucleotide
gggaggcgagccaugucc

SEQ ID NO: 1512 - RNA, 18 nt, Artificial Sequence
  Description of Artificial Sequence: Synthetic oligonucleotide
ggcuuuuccuugguuggg

SEQ ID NO: 1513 - RNA, 18 nt, Artificial Sequence
  Description of Artificial Sequence: Synthetic oligonucleotide
ggguggcuuuuccuuggu

SEQ ID NO: 1514 - RNA, 18 nt, Artificial Sequence
  Description of Artificial Sequence: Synthetic oligonucleotide
ccaccaggcggugguggg

SEQ ID NO: 1515 - RNA, 18 nt, Artificial Sequence
  Description of Artificial Sequence: Synthetic oligonucleotide
accaccaccaggcggugg

SEQ ID NO: 1516 - RNA, 18 nt, Artificial Sequence
  Description of Artificial Sequence: Synthetic oligonucleotide
ucuuuaccaccaccaggc

SEQ ID NO: 1517 - RNA, 18 nt, Artificial Sequence
  Description of Artificial Sequence: Synthetic oligonucleotide
acaggucuuuaccaccac

SEQ ID NO: 1518 - RNA, 18 nt, Artificial Sequence
  Description of Artificial Sequence: Synthetic oligonucleotide
auagaacaggucuuuacc

SEQ ID NO: 1519 - RNA, 18 nt, Artificial Sequence
  Description of Artificial Sequence: Synthetic oligonucleotide
cuuacauagaacaggucu

SEQ ID NO: 1520 - RNA, 18 nt, Artificial Sequence
  Description of Artificial Sequence: Synthetic oligonucleotide
gacggcuuacauagaaca

SEQ ID NO: 1521 - RNA, 18 nt, Artificial Sequence
  Description of Artificial Sequence: Synthetic oligonucleotide
ggguggacggcuuacaua

SEQ ID NO: 1522 - RNA, 18 nt, Artificial Sequence
  Description of Artificial Sequence: Synthetic oligonucleotide
gugaggaacgggccaggg

SEQ ID NO: 1523 - RNA, 18 nt, Artificial Sequence
  Description of Artificial Sequence: Synthetic oligonucleotide
ggugaggaacgggccagg

SEQ ID NO: 1524 - RNA, 18 nt, Artificial Sequence
  Description of Artificial Sequence: Synthetic oligonucleotide
augcuggugaggaacggg

SEQ ID NO: 1525 - RNA, 18 nt, Artificial Sequence
  Description of Artificial Sequence: Synthetic oligonucleotide
gcaguaugcuggugagga

SEQ ID NO: 1526 - RNA, 18 nt, Artificial Sequence
  Description of Artificial Sequence: Synthetic oligonucleotide
cucgugcaguaugcuggu

SEQ ID NO: 1527 - RNA, 18 nt, Artificial Sequence
  Description of Artificial Sequence: Synthetic oligonucleotide
agcugcucgugcaguaug

SEQ ID NO: 1528 - RNA, 18 nt, Artificial Sequence
  Description of Artificial Sequence: Synthetic oligonucleotide
guccgagcugcucgugca

SEQ ID NO: 1529 - RNA, 18 nt, Artificial Sequence
  Description of Artificial Sequence: Synthetic oligonucleotide
gugauguccgagcugcuc

SEQ ID NO: 1530 - RNA, 18 nt, Artificial Sequence
  Description of Artificial Sequence: Synthetic oligonucleotide
gcucugugauguccgagc

SEQ ID NO: 1531 - RNA, 18 nt, Artificial Sequence
  Description of Artificial Sequence: Synthetic oligonucleotide
cucuggcucugugauguc

SEQ ID NO: 1532 - RNA, 18 nt, Artificial Sequence
  Description of Artificial Sequence: Synthetic oligonucleotide
uucugcucuggcucugug

SEQ ID NO: 1533 - RNA, 18 nt, Artificial Sequence
  Description of Artificial Sequence: Synthetic oligonucleotide
gcaucuucugcucuggcu

SEQ ID NO: 1534 - RNA, 18 nt, Artificial Sequence
  Description of Artificial Sequence: Synthetic oligonucleotide
acucagcaucuucugcuc

SEQ ID NO: 1535 - RNA, 18 nt, Artificial Sequence
  Description of Artificial Sequence: Synthetic oligonucleotide
uugacacucagcaucuuc

SEQ ID NO: 1536 - RNA, 18 nt, Artificial Sequence
  Description of Artificial Sequence: Synthetic oligonucleotide
ucuuguugacacucagca

SEQ ID NO: 1537 - RNA, 18 nt, Artificial Sequence
  Description of Artificial Sequence: Synthetic oligonucleotide
cacacucuuguugacacu

SEQ ID NO: 1538 - RNA, 18 nt, Artificial Sequence
  Description of Artificial Sequence: Synthetic oligonucleotide
auggacacacucuuguug

SEQ ID NO: 1539 - RNA, 18 nt, Artificial Sequence
  Description of Artificial Sequence: Synthetic oligonucleotide
ccagcauggacacacucu

SEQ ID NO: 1540 - RNA, 18 nt, Artificial Sequence
  Description of Artificial Sequence: Synthetic oligonucleotide
uaaguccagcauggacac

SEQ ID NO: 1541 - RNA, 18 nt, Artificial Sequence
  Description of Artificial Sequence: Synthetic oligonucleotide
cccuguaaguccagcaug

SEQ ID NO: 1542 - RNA, 18 nt, Artificial Sequence
  Description of Artificial Sequence: Synthetic oligonucleotide
caucacccuguaagucca

SEQ ID NO: 1543 - RNA, 18 nt, Artificial Sequence
  Description of Artificial Sequence: Synthetic oligonucleotide
aggcccaucacccuguaa

SEQ ID NO: 1544 - RNA, 18 nt, Artificial Sequence
  Description of Artificial Sequence: Synthetic oligonucleotide
ccaccaggcccaucaccc

SEQ ID NO: 1545 - RNA, 18 nt, Artificial Sequence
  Description of Artificial Sequence: Synthetic oligonucleotide
ggcggccaccaggcccau

SEQ ID NO: 1546 - RNA, 18 nt, Artificial Sequence
  Description of Artificial Sequence: Synthetic oligonucleotide
guugaggcggccaccagg

SEQ ID NO: 1547 - RNA, 18 nt, Artificial Sequence
  Description of Artificial Sequence: Synthetic oligonucleotide
cugcuguugaggcggcca

SEQ ID NO: 1548 - RNA, 18 nt, Artificial Sequence
  Description of Artificial Sequence: Synthetic oligonucleotide
cacugcugcuguugaggc

SEQ ID NO: 1549 - RNA, 18 nt, Artificial Sequence
  Description of Artificial Sequence: Synthetic oligonucleotide
cgaaacacugcugcuguu

SEQ ID NO: 1550 - RNA, 18 nt, Artificial Sequence
  Description of Artificial Sequence: Synthetic oligonucleotide
agguucgaaacacugcug

SEQ ID NO: 1551 - RNA, 18 nt, Artificial Sequence
  Description of Artificial Sequence: Synthetic oligonucleotide
ccgccagguucgaaacac

SEQ ID NO: 1552 - RNA, 18 nt, Artificial Sequence
  Description of Artificial Sequence: Synthetic oligonucleotide
uacggccgccagguucga

SEQ ID NO: 1553 - RNA, 18 nt, Artificial Sequence
  Description of Artificial Sequence: Synthetic oligonucleotide
uccccuacggccgccagg

SEQ ID NO: 1554 - RNA, 18 nt, Artificial Sequence
  Description of Artificial Sequence: Synthetic oligonucleotide
gcagguccccuacggccg

SEQ ID NO: 1555 - RNA, 18 nt, Artificial Sequence
  Description of Artificial Sequence: Synthetic oligonucleotide
gugcagcagguccccuac

SEQ ID NO: 1556 - RNA, 18 nt, Artificial Sequence
  Description of Artificial Sequence: Synthetic oligonucleotide
cuugagugcagcaggucc

SEQ ID NO: 1557 - RNA, 18 nt, Artificial Sequence
  Description of Artificial Sequence: Synthetic oligonucleotide
ccuggcuugagugcagca

SEQ ID NO: 1558 - RNA, 18 nt, Artificial Sequence
  Description of Artificial Sequence: Synthetic oligonucleotide
cgaggccuggcuugagug

SEQ ID NO: 1559 - RNA, 18 nt, Artificial Sequence
  Description of Artificial Sequence: Synthetic oligonucleotide
gucagcgaggccuggcuu

SEQ ID NO: 1560 - RNA, 18 nt, Artificial Sequence
  Description of Artificial Sequence: Synthetic oligonucleotide
cugcugucagcgaggccu

SEQ ID NO: 1561 - RNA, 18 nt, Artificial Sequence
  Description of Artificial Sequence: Synthetic oligonucleotide
caaggcugcugucagcga

SEQ ID NO: 1562 - RNA, 18 nt, Artificial Sequence
  Description of Artificial Sequence: Synthetic oligonucleotide
agccccaaggcugcuguc

SEQ ID NO: 1563 - RNA, 18 nt, Artificial Sequence
  Description of Artificial Sequence: Synthetic oligonucleotide
gccguagccccaaggcug

SEQ ID NO: 1564 - RNA, 18 nt, Artificial Sequence
  Description of Artificial Sequence: Synthetic oligonucleotide
cgcaggccguagccccaa

SEQ ID NO: 1565 - RNA, 18 nt, Artificial Sequence
  Description of Artificial Sequence: Synthetic oligonucleotide
gcaggcgcaggccguagc

SEQ ID NO: 1566 - RNA, 18 nt, Artificial Sequence
  Description of Artificial Sequence: Synthetic oligonucleotide
guccggcaggcgcaggcc

SEQ ID NO: 1567 - RNA, 18 nt, Artificial Sequence
  Description of Artificial Sequence: Synthetic oligonucleotide
gaggcguccggcaggcgc

SEQ ID NO: 1568 - RNA, 18 nt, Artificial Sequence
  Description of Artificial Sequence: Synthetic oligonucleotide
ugggagaggcguccggca

SEQ ID NO: 1569 - RNA, 18 nt, Artificial Sequence
  Description of Artificial Sequence: Synthetic oligonucleotide
uccccugggagaggcguc

SEQ ID NO: 1570 - RNA, 18 nt, Artificial Sequence
  Description of Artificial Sequence: Synthetic oligonucleotide
gccacuccccugggagag

SEQ ID NO: 1571 - RNA, 18 nt, Artificial Sequence
  Description of Artificial Sequence: Synthetic oligonucleotide
gaugagccacuccccugg

SEQ ID NO: 1572 - RNA, 18 nt, Artificial Sequence
  Description of Artificial Sequence: Synthetic oligonucleotide
ugauggaugagccacucc

SEQ ID NO: 1573 - RNA, 18 nt, Artificial Sequence
  Description of Artificial Sequence: Synthetic oligonucleotide
cgccgugauggaugagcc

SEQ ID NO: 1574 - RNA, 18 nt, Artificial Sequence
  Description of Artificial Sequence: Synthetic oligonucleotide
ccagccgccgugauggau

SEQ ID NO: 1575 - RNA, 18 nt, Artificial Sequence
  Description of Artificial Sequence: Synthetic oligonucleotide
gcaugccagccgccguga

SEQ ID NO: 1576 - RNA, 18 nt, Artificial Sequence
  Description of Artificial Sequence: Synthetic oligonucleotide
gaggcgcaugccagccgc

SEQ ID NO: 1577 - RNA, 18 nt, Artificial Sequence
  Description of Artificial Sequence: Synthetic oligonucleotide
uggcugaggcgcaugcca

SEQ ID NO: 1578 - RNA, 18 nt, Artificial Sequence
  Description of Artificial Sequence: Synthetic oligonucleotide
ccaucuggcugaggcgca

SEQ ID NO: 1579 - RNA, 18 nt, Artificial Sequence
  Description of Artificial Sequence: Synthetic oligonucleotide
gacacccaucuggcugag

SEQ ID NO: 1580 - RNA, 18 nt, Artificial Sequence
  Description of Artificial Sequence: Synthetic oligonucleotide
guggugacacccaucugg

SEQ ID NO: 1581 - RNA, 18 nt, Artificial Sequence
  Description of Artificial Sequence: Synthetic oligonucleotide
cgucuguggugacaccca

SEQ ID NO: 1582 - RNA, 18 nt, Artificial Sequence
  Description of Artificial Sequence: Synthetic oligonucleotide
gacaccgucuguggugac

SEQ ID NO: 1583 - RNA, 18 nt, Artificial Sequence
  Description of Artificial Sequence: Synthetic oligonucleotide
gcagggacaccgucugug

SEQ ID NO: 1584 - RNA, 18 nt, Artificial Sequence
  Description of Artificial Sequence: Synthetic oligonucleotide
gcugggcagggacaccgu

SEQ ID NO: 1585 - RNA, 18 nt, Artificial Sequence
  Description of Artificial Sequence: Synthetic oligonucleotide
caguugcugggcagggac

SEQ ID NO: 1586 - RNA, 18 nt, Artificial Sequence
  Description of Artificial Sequence: Synthetic oligonucleotide
auucgcaguugcugggca

SEQ ID NO: 1587 - RNA, 18 nt, Artificial Sequence
  Description of Artificial Sequence: Synthetic oligonucleotide
gguucuggaaggagaggg

SEQ ID NO: 1588 - RNA, 18 nt, Artificial Sequence
  Description of Artificial Sequence: Synthetic oligonucleotide
gagaggguucuggaagga

SEQ ID NO: 1589 - RNA, 18 nt, Artificial Sequence
  Description of Artificial Sequence: Synthetic oligonucleotide
uggaagagaggguucugg

SEQ ID NO: 1590 - RNA, 18 nt, Artificial Sequence
  Description of Artificial Sequence: Synthetic oligonucleotide
ccauguggaagagagggu

SEQ ID NO: 1591 - RNA, 18 nt, Artificial Sequence
  Description of Artificial Sequence: Synthetic oligonucleotide
agcagccauguggaagag

SEQ ID NO: 1592 - RNA, 18 nt, Artificial Sequence
  Description of Artificial Sequence: Synthetic oligonucleotide
ccaucagcagccaugugg

SEQ ID NO: 1593 - RNA, 18 nt, Artificial Sequence
  Description of Artificial Sequence: Synthetic oligonucleotide
cuggcccaucagcagcca

SEQ ID NO: 1594 - RNA, 18 nt, Artificial Sequence
  Description of Artificial Sequence: Synthetic oligonucleotide
gggaccuggcccaucagc

SEQ ID NO: 1595 - RNA, 18 nt, Artificial Sequence
  Description of Artificial Sequence: Synthetic oligonucleotide
ccuccauggccgccuggg

SEQ ID NO: 1596 - RNA, 18 nt, Artificial Sequence
  Description of Artificial Sequence: Synthetic oligonucleotide
cccccuccauggccgccu

SEQ ID NO: 1597 - RNA, 18 nt, Artificial Sequence
  Description of Artificial Sequence: Synthetic oligonucleotide
caccgcccccuccauggc

SEQ ID NO: 1598 - RNA, 18 nt, Artificial Sequence
  Description of Artificial Sequence: Synthetic oligonucleotide
auggccaccgcccccucc

SEQ ID NO: 1599 - RNA, 18 nt, Artificial Sequence
  Description of Artificial Sequence: Synthetic oligonucleotide
gggccauggccaccgccc

SEQ ID NO: 1600 - RNA, 18 nt, Artificial Sequence
  Description of Artificial Sequence: Synthetic oligonucleotide
aaggugggccauggccac

SEQ ID NO: 1601 - RNA, 18 nt, Artificial Sequence
  Description of Artificial Sequence: Synthetic oligonucleotide
ggaggaaggugggccaug

SEQ ID NO: 1602 - RNA, 18 nt, Artificial Sequence
  Description of Artificial Sequence: Synthetic oligonucleotide
ugaugggaggaagguggg

SEQ ID NO: 1603 - RNA, 18 nt, Artificial Sequence
  Description of Artificial Sequence: Synthetic oligonucleotide
gguggugaugggaggaag

SEQ ID NO: 1604 - RNA, 18 nt, Artificial Sequence
  Description of Artificial Sequence: Synthetic oligonucleotide
guggugguggugauggga

SEQ ID NO: 1605 - RNA, 18 nt, Artificial Sequence
  Description of Artificial Sequence: Synthetic oligonucleotide
ugguggugguggugguga

SEQ ID NO: 1606 - RNA, 18 nt, Artificial Sequence
  Description of Artificial Sequence: Synthetic oligonucleotide
ggugaugguggugguggu

SEQ ID NO: 1607 - RNA, 18 nt, Artificial Sequence
  Description of Artificial Sequence: Synthetic oligonucleotide
gugguggugaugguggug

SEQ ID NO: 1608 - RNA, 18 nt, Artificial Sequence
  Description of Artificial Sequence: Synthetic oligonucleotide
ccucggugguggugaugg

SEQ ID NO: 1609 - RNA, 18 nt, Artificial Sequence
  Description of Artificial Sequence: Synthetic oligonucleotide
cuccaccucggugguggu

SEQ ID NO: 1610 - RNA, 18 nt, Artificial Sequence
  Description of Artificial Sequence: Synthetic oligonucleotide
gggcucuccaccucggug

SEQ ID NO: 1611 - RNA, 18 nt, Artificial Sequence
  Description of Artificial Sequence: Synthetic oligonucleotide
gcaaagguguccccaggg

SEQ ID NO: 1612 - RNA, 18 nt, Artificial Sequence
  Description of Artificial Sequence: Synthetic oligonucleotide
cuauagccauggaauggg

SEQ ID NO: 1613 - RNA, 18 nt, Artificial Sequence
  Description of Artificial Sequence: Synthetic oligonucleotide
ucuugcuauagccaugga

SEQ ID NO: 1614 - RNA, 18 nt, Artificial Sequence
  Description of Artificial Sequence: Synthetic oligonucleotide
cucacucuugcuauagcc

SEQ ID NO: 1615 - RNA, 18 nt, Artificial Sequence
  Description of Artificial Sequence: Synthetic oligonucleotide
agguccucacucuugcua

SEQ ID NO: 1616 - RNA, 18 nt, Artificial Sequence
  Description of Artificial Sequence: Synthetic oligonucleotide
aagagagguccucacucu

SEQ ID NO: 1617 - RNA, 18 nt, Artificial Sequence
  Description of Artificial Sequence: Synthetic oligonucleotide
cccggaagagagguccuc

SEQ ID NO: 1618 - RNA, 18 nt, Artificial Sequence
  Description of Artificial Sequence: Synthetic oligonucleotide
gggaccccggaagagagg

SEQ ID NO: 1619 - RNA, 18 nt, Artificial Sequence
  Description of Artificial Sequence: Synthetic oligonucleotide
aggauggaggcagcaggg

SEQ ID NO: 1620 - RNA, 18 nt, Artificial Sequence
  Description of Artificial Sequence: Synthetic oligonucleotide
ugaaggauggaggcagca

SEQ ID NO: 1621 - RNA, 18 nt, Artificial Sequence
  Description of Artificial Sequence: Synthetic oligonucleotide
ggcuaugaaggauggagg

SEQ ID NO: 1622 - RNA, 18 nt, Artificial Sequence
  Description of Artificial Sequence: Synthetic oligonucleotide
gcuguggcuaugaaggau

SEQ ID NO: 1623 - RNA, 18 nt, Artificial Sequence
  Description of Artificial Sequence: Synthetic oligonucleotide
cuguagcuguggcuauga

SEQ ID NO: 1624 - RNA, 18 nt, Artificial Sequence
  Description of Artificial Sequence: Synthetic oligonucleotide
caucacuguagcuguggc

SEQ ID NO: 1625 - RNA, 18 nt, Artificial Sequence
  Description of Artificial Sequence: Synthetic oligonucleotide
aaacucaucacuguagcu

SEQ ID NO: 1626 - RNA, 18 nt, Artificial Sequence
  Description of Artificial Sequence: Synthetic oligonucleotide
gguccaaacucaucacug

SEQ ID NO: 1627 - RNA, 18 nt, Artificial Sequence
  Description of Artificial Sequence: Synthetic oligonucleotide
cagaggguccaaacucau

SEQ ID NO: 1628 - RNA, 18 nt, Artificial Sequence
  Description of Artificial Sequence: Synthetic oligonucleotide
agugccagaggguccaaa

SEQ ID NO: 1629 - RNA, 18 nt, Artificial Sequence
  Description of Artificial Sequence: Synthetic oligonucleotide
aagucagugccagagggu

SEQ ID NO: 1630 - RNA, 18 nt, Artificial Sequence
  Description of Artificial Sequence: Synthetic oligonucleotide
gggugaagucagugccag

SEQ ID NO: 1631 - RNA, 18 nt, Artificial Sequence
  Description of Artificial Sequence: Synthetic oligonucleotide
ccgacgggugaagucagu

SEQ ID NO: 1632 - RNA, 18 nt, Artificial Sequence
  Description of Artificial Sequence: Synthetic oligonucleotide
agcugccgacgggugaag

SEQ ID NO: 1633 - RNA, 18 nt, Artificial Sequence
  Description of Artificial Sequence: Synthetic oligonucleotide
gugaaagcugccgacggg

SEQ ID NO: 1634 - RNA, 18 nt, Artificial Sequence
  Description of Artificial Sequence: Synthetic oligonucleotide
cuggagugaaagcugccg

SEQ ID NO: 1635 - RNA, 18 nt, Artificial Sequence
  Description of Artificial Sequence: Synthetic oligonucleotide
uuguccuggagugaaagc

SEQ ID NO: 1636 - RNA, 18 nt, Artificial Sequence
  Description of Artificial Sequence: Synthetic oligonucleotide
gcagguuguccuggagug

SEQ ID NO: 1637 - RNA, 18 nt, Artificial Sequence
  Description of Artificial Sequence: Synthetic oligonucleotide
gugcugcagguuguccug

SEQ ID NO: 1638 - RNA, 18 nt, Artificial Sequence
  Description of Artificial Sequence: Synthetic oligonucleotide
agcaugugcugcagguug

SEQ ID NO: 1639 - RNA, 18 nt, Artificial Sequence
  Description of Artificial Sequence: Synthetic oligonucleotide
gggacagcaugugcugca

SEQ ID NO: 1640 - RNA, 18 nt, Artificial Sequence
  Description of Artificial Sequence: Synthetic oligonucleotide
gaccaauggugaucuggg

SEQ ID NO: 1641 - RNA, 18 nt, Artificial Sequence
  Description of Artificial Sequence: Synthetic oligonucleotide
gggaccaauggugaucug

SEQ ID NO: 1642 - RNA, 18 nt, Artificial Sequence
  Description of Artificial Sequence: Synthetic oligonucleotide
accuccaggcccugaggg

SEQ ID NO: 1643 - RNA, 18 nt, Artificial Sequence
  Description of Artificial Sequence: Synthetic oligonucleotide
cucccaccuccaggcccu

SEQ ID NO: 1644 - RNA, 18 nt, Artificial Sequence
  Description of Artificial Sequence: Synthetic oligonucleotide
caccgcucccaccuccag

SEQ ID NO: 1645 - RNA, 18 nt, Artificial Sequence
  Description of Artificial Sequence: Synthetic oligonucleotide
gcccccaccgcucccacc

SEQ ID NO: 1646 - RNA, 18 nt, Artificial Sequence
  Description of Artificial Sequence: Synthetic oligonucleotide
ccgcugcccccaccgcuc

SEQ ID NO: 1647 - RNA, 18 nt, Artificial Sequence
  Description of Artificial Sequence: Synthetic oligonucleotide
ccccaccgcugcccccac

SEQ ID NO: 1648 - RNA, 18 nt, Artificial Sequence
  Description of Artificial Sequence: Synthetic oligonucleotide
gccacccccaccgcugcc

SEQ ID NO: 1649 - RNA, 18 nt, Artificial Sequence
  Description of Artificial Sequence: Synthetic oligonucleotide
cccccgccacccccaccg

SEQ ID NO: 1650 - RNA, 18 nt, Artificial Sequence
  Description of Artificial Sequence: Synthetic oligonucleotide
gcuggcccccgccacccc

SEQ ID NO: 1651 - RNA, 18 nt, Artificial Sequence
  Description of Artificial Sequence: Synthetic oligonucleotide
aggcggcuggcccccgcc

SEQ ID NO: 1652 - RNA, 18 nt, Artificial Sequence
  Description of Artificial Sequence: Synthetic oligonucleotide
aauggaggcggcuggccc

SEQ ID NO: 1653 - RNA, 18 nt, Artificial Sequence
  Description of Artificial Sequence: Synthetic oligonucleotide
ucugcaauggaggcggcu

SEQ ID NO: 1654 - RNA, 18 nt, Artificial Sequence
  Description of Artificial Sequence: Synthetic oligonucleotide
gccccucugcaauggagg

SEQ ID NO: 1655 - RNA, 18 nt, Artificial Sequence
  Description of Artificial Sequence: Synthetic oligonucleotide
gacuugccccucugcaau

SEQ ID NO: 1656 - RNA, 18 nt, Artificial Sequence
  Description of Artificial Sequence: Synthetic oligonucleotide
gcugagacuugccccucu

SEQ ID NO: 1657 - RNA, 18 nt, Artificial Sequence
  Description of Artificial Sequence: Synthetic oligonucleotide
caacugcugagacuugcc

SEQ ID NO: 1658 - RNA, 18 nt, Artificial Sequence
  Description of Artificial Sequence: Synthetic oligonucleotide
acugucaacugcugagac

SEQ ID NO: 1659 - RNA, 18 nt, Artificial Sequence
  Description of Artificial Sequence: Synthetic oligonucleotide
cgcugacugucaacugcu

SEQ ID NO: 1660 - RNA, 18 nt, Artificial Sequence
  Description of Artificial Sequence: Synthetic oligonucleotide
ggcugcgcugacugucaa

SEQ ID NO: 1661 - RNA, 18 nt, Artificial Sequence
  Description of Artificial Sequence: Synthetic oligonucleotide
uucugggcugcgcugacu

SEQ ID NO: 1662 - RNA, 18 nt, Artificial Sequence
  Description of Artificial Sequence: Synthetic oligonucleotide
ucccgcuggauggccggg

SEQ ID NO: 1663 - RNA, 18 nt, Artificial Sequence
  Description of Artificial Sequence: Synthetic oligonucleotide
uagauucccgcuggaugg

SEQ ID NO: 1664 - RNA, 18 nt, Artificial Sequence
  Description of Artificial Sequence: Synthetic oligonucleotide
ugcaauagauucccgcug

SEQ ID NO: 1665 - RNA, 18 nt, Artificial Sequence
  Description of Artificial Sequence: Synthetic oligonucleotide
gggacugcaauagauucc

SEQ ID NO: 1666 - RNA, 18 nt, Artificial Sequence
  Description of Artificial Sequence: Synthetic oligonucleotide
ccauaacuuggcucuggg

SEQ ID NO: 1667 - RNA, 18 nt, Artificial Sequence
  Description of Artificial Sequence: Synthetic oligonucleotide
gggccauaacuuggcucu

SEQ ID NO: 1668 - RNA, 18 nt, Artificial Sequence
  Description of Artificial Sequence: Synthetic oligonucleotide
uugccguggacgggcggg

SEQ ID NO: 1669 - RNA, 18 nt, Artificial Sequence
  Description of Artificial Sequence: Synthetic oligonucleotide
uguugccguggacgggcg

SEQ ID NO: 1670 - RNA, 18 nt, Artificial Sequence
  Description of Artificial Sequence: Synthetic oligonucleotide
ggcucuguugccguggac

SEQ ID NO: 1671 - RNA, 18 nt, Artificial Sequence
  Description of Artificial Sequence: Synthetic oligonucleotide
gcugaggcucuguugccg

SEQ ID NO: 1672 - RNA, 18 nt, Artificial Sequence
  Description of Artificial Sequence: Synthetic oligonucleotide
uccuugcugaggcucugu

SEQ ID NO: 1673 - RNA, 18 nt, Artificial Sequence
  Description of Artificial Sequence: Synthetic oligonucleotide
ugcccuccuugcugaggc

SEQ ID NO: 1674 - RNA, 18 nt, Artificial Sequence
  Description of Artificial Sequence: Synthetic oligonucleotide
aaugcugcccuccuugcu

SEQ ID NO: 1675 - RNA, 18 nt, Artificial Sequence
  Description of Artificial Sequence: Synthetic oligonucleotide
cccccaaugcugcccucc

SEQ ID NO: 1676 - RNA, 18 nt, Artificial Sequence
  Description of Artificial Sequence: Synthetic oligonucleotide
cgcugcccccaaugcugc

SEQ ID NO: 1677 - RNA, 18 nt, Artificial Sequence
  Description of Artificial Sequence: Synthetic oligonucleotide
gcccccgcugcccccaau

SEQ ID NO: 1678 - RNA, 18 nt, Artificial Sequence
  Description of Artificial Sequence: Synthetic oligonucleotide
ccgcugcccccgcugccc

SEQ ID NO: 1679 - RNA, 18 nt, Artificial Sequence
  Description of Artificial Sequence: Synthetic oligonucleotide
cgccaccgcugcccccgc

SEQ ID NO: 1680 - RNA, 18 nt, Artificial Sequence
  Description of Artificial Sequence: Synthetic oligonucleotide
cccuccgccaccgcugcc

SEQ ID NO: 1681 - RNA, 18 nt, Artificial Sequence
  Description of Artificial Sequence: Synthetic oligonucleotide
ccacccccuccgccaccg

SEQ ID NO: 1682 - RNA, 18 nt, Artificial Sequence
  Description of Artificial Sequence: Synthetic oligonucleotide
gccccccacccccuccgc

SEQ ID NO: 1683 - RNA, 18 nt, Artificial Sequence
  Description of Artificial Sequence: Synthetic oligonucleotide
cuucagccccccaccccc

SEQ ID NO: 1684 - RNA, 18 nt, Artificial Sequence
  Description of Artificial Sequence: Synthetic oligonucleotide
gagggcuucagcccccca

SEQ ID NO: 1685 - RNA, 18 nt, Artificial Sequence
  Description of Artificial Sequence: Synthetic oligonucleotide
ugauggagggcuucagcc

SEQ ID NO: 1686 - RNA, 18 nt, Artificial Sequence
  Description of Artificial Sequence: Synthetic oligonucleotide
cuuggugauggagggcuu

SEQ ID NO: 1687 - RNA, 18 nt, Artificial Sequence
  Description of Artificial Sequence: Synthetic oligonucleotide
gccuuccuccugccuuca

SEQ ID NO: 1688 - RNA, 18 nt, Artificial Sequence
  Description of Artificial Sequence: Synthetic oligonucleotide
agcccgccuuccuccugc

SEQ ID NO: 1689 - RNA, 18 nt, Artificial Sequence
  Description of Artificial Sequence: Synthetic oligonucleotide
gacccagcccgccuuccu

SEQ ID NO: 1690 - RNA, 18 nt, Artificial Sequence
  Description of Artificial Sequence: Synthetic oligonucleotide
guugugacccagcccgcc

SEQ ID NO: 1691 - RNA, 18 nt, Artificial Sequence
  Description of Artificial Sequence: Synthetic oligonucleotide
ucccuguugugacccagc

SEQ ID NO: 1692 - RNA, 18 nt, Artificial Sequence
  Description of Artificial Sequence: Synthetic oligonucleotide
uucccucccuguugugac

SEQ ID NO: 1693 - RNA, 18 nt, Artificial Sequence
  Description of Artificial Sequence: Synthetic oligonucleotide
ccuucuucccucccuguu

SEQ ID NO: 1694 - RNA, 18 nt, Artificial Sequence
  Description of Artificial Sequence: Synthetic oligonucleotide
caucuccuucuucccucc

SEQ ID NO: 1695 - RNA, 18 nt, Artificial Sequence
  Description of Artificial Sequence: Synthetic oligonucleotide
ccccccaucuccuucuuc

SEQ ID NO: 1696 - RNA, 18 nt, Artificial Sequence
  Description of Artificial Sequence: Synthetic oligonucleotide
ccccaccccccaucuccu

SEQ ID NO: 1697 - RNA, 18 nt, Artificial Sequence
  Description of Artificial Sequence: Synthetic oligonucleotide
uucaaccccaccccccau

SEQ ID NO: 1698 - RNA, 18 nt, Artificial Sequence
  Description of Artificial Sequence: Synthetic oligonucleotide
ucuguuucaaccccaccc

SEQ ID NO: 1699 - RNA, 18 nt, Artificial Sequence
  Description of Artificial Sequence: Synthetic oligonucleotide
cagacucuguuucaaccc

SEQ ID NO: 1700 - RNA, 18 nt, Artificial Sequence
  Description of Artificial Sequence: Synthetic oligonucleotide
ggccacagacucuguuuc

SEQ ID NO: 1701 - RNA, 18 nt, Artificial Sequence
  Description of Artificial Sequence: Synthetic oligonucleotide
cuucaggccacagacucu

SEQ ID NO: 1702 - RNA, 18 nt, Artificial Sequence
  Description of Artificial Sequence: Synthetic oligonucleotide
uguaacuucaggccacag

SEQ ID NO: 1703 - RNA, 18 nt, Artificial Sequence
  Description of Artificial Sequence: Synthetic oligonucleotide
aagauuguaacuucaggc

SEQ ID NO: 1704 - RNA, 18 nt, Artificial Sequence
  Description of Artificial Sequence: Synthetic oligonucleotide
gcaagaagauuguaacuu

SEQ ID NO: 1705 - RNA, 18 nt, Artificial Sequence
  Description of Artificial Sequence: Synthetic oligonucleotide
aggaggcaagaagauugu

SEQ ID NO: 1706 - RNA, 18 nt, Artificial Sequence
  Description of Artificial Sequence: Synthetic oligonucleotide
ccaaaaggaggcaagaag

SEQ ID NO: 1707 - RNA, 18 nt, Artificial Sequence
  Description of Artificial Sequence: Synthetic oligonucleotide
aauggccaaaaggaggca

SEQ ID NO: 1708 - RNA, 18 nt, Artificial Sequence
  Description of Artificial Sequence: Synthetic oligonucleotide
uguuuaauggccaaaagg

SEQ ID NO: 1709 - RNA, 18 nt, Artificial Sequence
  Description of Artificial Sequence: Synthetic oligonucleotide
acauuuguuuaauggcca

SEQ ID NO: 1710 - RNA, 18 nt, Artificial Sequence
  Description of Artificial Sequence: Synthetic oligonucleotide
uauacacauuuguuuaau

SEQ ID NO: 1711 - RNA, 18 nt, Artificial Sequence
  Description of Artificial Sequence: Synthetic oligonucleotide
cccucuauacacauuugu

SEQ ID NO: 1712 - RNA, 18 nt, Artificial Sequence
  Description of Artificial Sequence: Synthetic oligonucleotide
gcaggcccucuauacaca

SEQ ID NO: 1713 - RNA, 18 nt, Artificial Sequence
  Description of Artificial Sequence: Synthetic oligonucleotide
acauagcaggcccucuau

SEQ ID NO: 1714 - RNA, 18 nt, Artificial Sequence
  Description of Artificial Sequence: Synthetic oligonucleotide
auggcacauagcaggccc

SEQ ID NO: 1715 - RNA, 18 nt, Artificial Sequence
  Description of Artificial Sequence: Synthetic oligonucleotide
agcacauggcacauagca

SEQ ID NO: 1716 - RNA, 18 nt, Artificial Sequence
  Description of Artificial Sequence: Synthetic oligonucleotide
ggcauagcacauggcaca

SEQ ID NO: 1717 - RNA, 18 nt, Artificial Sequence
  Description of Artificial Sequence: Synthetic oligonucleotide
ugccuggcauagcacaug

SEQ ID NO: 1718 - RNA, 18 nt, Artificial Sequence
  Description of Artificial Sequence: Synthetic oligonucleotide
cuuagugccuggcauagc

SEQ ID NO: 1719 - RNA, 18 nt, Artificial Sequence
  Description of Artificial Sequence: Synthetic oligonucleotide
guauccuuagugccuggc

SEQ ID NO: 1720 - RNA, 18 nt, Artificial Sequence
  Description of Artificial Sequence: Synthetic oligonucleotide
gugccguauccuuagugc

SEQ ID NO: 1721 - RNA, 18 nt, Artificial Sequence
  Description of Artificial Sequence: Synthetic oligonucleotide
guucagugccguauccuu

SEQ ID NO: 1722 - RNA, 18 nt, Artificial Sequence
  Description of Artificial Sequence: Synthetic oligonucleotide
agaggguucagugccgua

SEQ ID NO: 1723 - RNA, 18 nt, Artificial Sequence
  Description of Artificial Sequence: Synthetic oligonucleotide
ugcuaagaggguucagug

SEQ ID NO: 1724 - RNA, 18 nt, Artificial Sequence
  Description of Artificial Sequence: Synthetic oligonucleotide
gagagugcuaagaggguu

SEQ ID NO: 1725 - RNA, 18 nt, Artificial Sequence
  Description of Artificial Sequence: Synthetic oligonucleotide
ggaaugagagugcuaaga

SEQ ID NO: 1726 - RNA, 18 nt, Artificial Sequence
  Description of Artificial Sequence: Synthetic oligonucleotide
ccucuggaaugagagugc

SEQ ID NO: 1727 - RNA, 18 nt, Artificial Sequence
  Description of Artificial Sequence: Synthetic oligonucleotide
aauccccucuggaaugag

SEQ ID NO: 1728 - RNA, 18 nt, Artificial Sequence
  Description of Artificial Sequence: Synthetic oligonucleotide
ggauuaauccccucugga

SEQ ID NO: 1729 - RNA, 18 nt, Artificial Sequence
  Description of Artificial Sequence: Synthetic oligonucleotide
cuuauggauuaauccccu

SEQ ID NO: 1730 - RNA, 18 nt, Artificial Sequence
  Description of Artificial Sequence: Synthetic oligonucleotide
uucuacuuauggauuaau

SEQ ID NO: 1731 - RNA, 18 nt, Artificial Sequence
  Description of Artificial Sequence: Synthetic oligonucleotide
ccccauucuacuuaugga

SEQ ID NO: 1732 - RNA, 18 nt, Artificial Sequence
  Description of Artificial Sequence: Synthetic oligonucleotide
gucacccccauucuacuu

SEQ ID NO: 1733 - RNA, 18 nt, Artificial Sequence
  Description of Artificial Sequence: Synthetic oligonucleotide
uuccagucacccccauuc

SEQ ID NO: 1734 - RNA, 18 nt, Artificial Sequence
  Description of Artificial Sequence: Synthetic oligonucleotide
cccuauuccagucacccc

SEQ ID NO: 1735 - RNA, 18 nt, Artificial Sequence
  Description of Artificial Sequence: Synthetic oligonucleotide
gcuggcccuauuccaguc

SEQ ID NO: 1736 - RNA, 18 nt, Artificial Sequence
  Description of Artificial Sequence: Synthetic oligonucleotide
ccccagcuggcccuauuc

SEQ ID NO: 1737 - RNA, 18 nt, Artificial Sequence
  Description of Artificial Sequence: Synthetic oligonucleotide
ggauuaauccccucugga

SEQ ID NO: 1738 - RNA, 18 nt, Artificial Sequence
  Description of Artificial Sequence: Synthetic oligonucleotide
cuuauggauuaauccccu

SEQ ID NO: 1739 - RNA, 18 nt, Artificial Sequence
  Description of Artificial Sequence: Synthetic oligonucleotide
uucuacuuauggauuaau

SEQ ID NO: 1740 - RNA, 18 nt, Artificial Sequence
  Description of Artificial Sequence: Synthetic oligonucleotide
ccccauucuacuuaugga

SEQ ID NO: 1741 - RNA, 18 nt, Artificial Sequence
  Description of Artificial Sequence: Synthetic oligonucleotide
gucacccccauucuacuu

SEQ ID NO: 1742 - RNA, 18 nt, Artificial Sequence
  Description of Artificial Sequence: Synthetic oligonucleotide
uuccagucacccccauuc

SEQ ID NO: 1743 - RNA, 18 nt, Artificial Sequence
  Description of Artificial Sequence: Synthetic oligonucleotide
cccuauuccagucacccc

SEQ ID NO: 1744 - RNA, 18 nt, Artificial Sequence
  Description of Artificial Sequence: Synthetic oligonucleotide
gcuggcccuauuccaguc

SEQ ID NO: 1745 - RNA, 18 nt, Artificial Sequence
  Description of Artificial Sequence: Synthetic oligonucleotide
ccccagcuggcccuauuc

SEQ ID NO: 1746 - RNA, 18 nt, Artificial Sequence
  Description of Artificial Sequence: Synthetic oligonucleotide
caagcccccagcuggccc

SEQ ID NO: 1747 - RNA, 18 nt, Artificial Sequence
  Description of Artificial Sequence: Synthetic oligonucleotide
gccuccaagcccccagcu

SEQ ID NO: 1748 - RNA, 18 nt, Artificial Sequence
  Description of Artificial Sequence: Synthetic oligonucleotide
uucaugccuccaagcccc

SEQ ID NO: 1749 - RNA, 18 nt, Artificial Sequence
  Description of Artificial Sequence: Synthetic oligonucleotide
ugaucuucaugccuccaa

SEQ ID NO: 1750 - RNA, 18 nt, Artificial Sequence
  Description of Artificial Sequence: Synthetic oligonucleotide
ggaucugaucuucaugcc

SEQ ID NO: 1751 - RNA, 18 nt, Artificial Sequence
  Description of Artificial Sequence: Synthetic oligonucleotide
auucaggaucugaucuuc

SEQ ID NO: 1752 - RNA, 18 nt, Artificial Sequence
  Description of Artificial Sequence: Synthetic oligonucleotide
uucugauucaggaucuga

SEQ ID NO: 1753 - RNA, 18 nt, Artificial Sequence
  Description of Artificial Sequence: Synthetic oligonucleotide
uguuguucugauucagga

SEQ ID NO: 1754 - RNA, 18 nt, Artificial Sequence
  Description of Artificial Sequence: Synthetic oligonucleotide
ucuccuguuguucugauu

SEQ ID NO: 1755 - RNA, 18 nt, Artificial Sequence
  Description of Artificial Sequence: Synthetic oligonucleotide
gaauuucuccuguuguuc

SEQ ID NO: 1756 - RNA, 18 nt, Artificial Sequence
  Description of Artificial Sequence: Synthetic oligonucleotide
ccagagaauuucuccugu

SEQ ID NO: 1757 - RNA, 18 nt, Artificial Sequence
  Description of Artificial Sequence: Synthetic oligonucleotide
gaaugccagagaauuucu

SEQ ID NO: 1758 - RNA, 18 nt, Artificial Sequence
  Description of Artificial Sequence: Synthetic oligonucleotide
gaguugaaugccagagaa

SEQ ID NO: 1759 - RNA, 18 nt, Artificial Sequence
  Description of Artificial Sequence: Synthetic oligonucleotide
gaugugaguugaaugcca

SEQ ID NO: 1760 - RNA, 18 nt, Artificial Sequence
  Description of Artificial Sequence: Synthetic oligonucleotide
ccagagaugugaguugaa

SEQ ID NO: 1761 - RNA, 18 nt, Artificial Sequence
  Description of Artificial Sequence: Synthetic oligonucleotide
gaaugccagagaugugag

SEQ ID NO: 1762 - RNA, 18 nt, Artificial Sequence
  Description of Artificial Sequence: Synthetic oligonucleotide
ccucugaaugccagagau

SEQ ID NO: 1763 - RNA, 18 nt, Artificial Sequence
  Description of Artificial Sequence: Synthetic oligonucleotide
uaucaccucugaaugcca

SEQ ID NO: 1764 - RNA, 18 nt, Artificial Sequence
  Description of Artificial Sequence: Synthetic oligonucleotide
gccuuuaucaccucugaa

SEQ ID NO: 1765 - RNA, 18 nt, Artificial Sequence
  Description of Artificial Sequence: Synthetic oligonucleotide
cuguagccuuuaucaccu

SEQ ID NO: 1766 - RNA, 18 nt, Artificial Sequence
  Description of Artificial Sequence: Synthetic oligonucleotide
cccugcuguagccuuuau

SEQ ID NO: 1767 - RNA, 18 nt, Artificial Sequence
  Description of Artificial Sequence: Synthetic oligonucleotide
uauugcccugcuguagcc

SEQ ID NO: 1768 - RNA, 18 nt, Artificial Sequence
  Description of Artificial Sequence: Synthetic oligonucleotide
aguccuauugcccugcug

SEQ ID NO: 1769 - RNA, 18 nt, Artificial Sequence
  Description of Artificial Sequence: Synthetic oligonucleotide
gucccaguccuauugccc

SEQ ID NO: 1770 - RNA, 18 nt, Artificial Sequence
  Description of Artificial Sequence: Synthetic oligonucleotide
cgacagucccaguccuau

SEQ ID NO: 1771 - RNA, 18 nt, Artificial Sequence
  Description of Artificial Sequence: Synthetic oligonucleotide
ggagacgacagucccagu

SEQ ID NO: 1772 - RNA, 18 nt, Artificial Sequence
  Description of Artificial Sequence: Synthetic oligonucleotide
ccaaaggagacgacaguc

SEQ ID NO: 1773 - RNA, 18 nt, Artificial Sequence
  Description of Artificial Sequence: Synthetic oligonucleotide
cacagccaaaggagacga

SEQ ID NO: 1774 - RNA, 18 nt, Artificial Sequence
  Description of Artificial Sequence: Synthetic oligonucleotide
aacagcacagccaaagga

SEQ ID NO: 1775 - RNA, 18 nt, Artificial Sequence
  Description of Artificial Sequence: Synthetic oligonucleotide
agggcaacagcacagcca

SEQ ID NO: 1776 - RNA, 18 nt, Artificial Sequence
  Description of Artificial Sequence: Synthetic oligonucleotide
uuuagagggcaacagcac

SEQ ID NO: 1777 - RNA, 18 nt, Artificial Sequence
  Description of Artificial Sequence: Synthetic oligonucleotide
guacauuuagagggcaac

SEQ ID NO: 1778 - RNA, 18 nt, Artificial Sequence
  Description of Artificial Sequence: Synthetic oligonucleotide
gcaggguacauuuagagg

SEQ ID NO: 1779 - RNA, 18 nt, Artificial Sequence
  Description of Artificial Sequence: Synthetic oligonucleotide
aaaaagcaggguacauuu

SEQ ID NO: 1780 - RNA, 18 nt, Artificial Sequence
  Description of Artificial Sequence: Synthetic oligonucleotide
gugggaaaaagcagggua

SEQ ID NO: 1781 - RNA, 18 nt, Artificial Sequence
  Description of Artificial Sequence: Synthetic oligonucleotide
aaaaggugggaaaaagca

SEQ ID NO: 1782 - RNA, 18 nt, Artificial Sequence
  Description of Artificial Sequence: Synthetic oligonucleotide
gaaagaaaaggugggaaa

SEQ ID NO: 1783 - RNA, 18 nt, Artificial Sequence
  Description of Artificial Sequence: Synthetic oligonucleotide
acagagaaagaaaaggug

SEQ ID NO: 1784 - RNA, 18 nt, Artificial Sequence
  Description of Artificial Sequence: Synthetic oligonucleotide
ggcgaacagagaaagaaa

SEQ ID NO: 1785 - RNA, 18 nt, Artificial Sequence
  Description of Artificial Sequence: Synthetic oligonucleotide
gugagggcgaacagagaa

SEQ ID NO: 1786 - RNA, 18 nt, Artificial Sequence
  Description of Artificial Sequence: Synthetic oligonucleotide
uggauggugucugagaau

SEQ ID NO: 1787 - RNA, 18 nt, Artificial Sequence
  Description of Artificial Sequence: Synthetic oligonucleotide
caauguggauggugucug

SEQ ID NO: 1788 - RNA, 18 nt, Artificial Sequence
  Description of Artificial Sequence: Synthetic oligonucleotide
ggguucaauguggauggu

SEQ ID NO: 1789 - RNA, 18 nt, Artificial Sequence
  Description of Artificial Sequence: Synthetic oligonucleotide
gcucagaggcuggcauug

SEQ ID NO: 1790 - RNA, 18 nt, Artificial Sequence
  Description of Artificial Sequence: Synthetic oligonucleotide
uguccgcucagaggcugg

SEQ ID NO: 1791 - RNA, 18 nt, Artificial Sequence
  Description of Artificial Sequence: Synthetic oligonucleotide
gccacuguccgcucagag

SEQ ID NO: 1792 - RNA, 18 nt, Artificial Sequence
  Description of Artificial Sequence: Synthetic oligonucleotide
cccaggccacuguccgcu

SEQ ID NO: 1793 - RNA, 18 nt, Artificial Sequence
  Description of Artificial Sequence: Synthetic oligonucleotide
ggagacccaggccacugu

SEQ ID NO: 1794 - RNA, 18 nt, Artificial Sequence
  Description of Artificial Sequence: Synthetic oligonucleotide
auguuggagacccaggcc

SEQ ID NO: 1795 - RNA, 18 nt, Artificial Sequence
  Description of Artificial Sequence: Synthetic oligonucleotide
gaggcauguuggagaccc

SEQ ID NO: 1796 - RNA, 18 nt, Artificial Sequence
  Description of Artificial Sequence: Synthetic oligonucleotide
caggugaggcauguugga

SEQ ID NO: 1797 - RNA, 18 nt, Artificial Sequence
  Description of Artificial Sequence: Synthetic oligonucleotide
gccgacaggugaggcaug

SEQ ID NO: 1798 - RNA, 18 nt, Artificial Sequence
  Description of Artificial Sequence: Synthetic oligonucleotide
ugucagccgacaggugag

SEQ ID NO: 1799 - RNA, 18 nt, Artificial Sequence
  Description of Artificial Sequence: Synthetic oligonucleotide
cucgaugucagccgacag

SEQ ID NO: 1800 - RNA, 18 nt, Artificial Sequence
  Description of Artificial Sequence: Synthetic oligonucleotide
gcacucucgaugucagcc

SEQ ID NO: 1801 - RNA, 18 nt, Artificial Sequence
  Description of Artificial Sequence: Synthetic oligonucleotide
ugugggcacucucgaugu

SEQ ID NO: 1802 - RNA, 18 nt, Artificial Sequence
  Description of Artificial Sequence: Synthetic oligonucleotide
cucgaugugggcacucuc

SEQ ID NO: 1803 - RNA, 18 nt, Artificial Sequence
  Description of Artificial Sequence: Synthetic oligonucleotide
ucccgcucgaugugggca

SEQ ID NO: 1804 - RNA, 18 nt, Artificial Sequence
  Description of Artificial Sequence: Synthetic oligonucleotide
acucuucccgcucgaugu

SEQ ID NO: 1805 - RNA, 18 nt, Artificial Sequence
  Description of Artificial Sequence: Synthetic oligonucleotide
cuuguacucuucccgcuc

SEQ ID NO: 1806 - RNA, 18 nt, Artificial Sequence
  Description of Artificial Sequence: Synthetic oligonucleotide
uugagcuuguacucuucc

SEQ ID NO: 1807 - RNA, 18 nt, Artificial Sequence
  Description of Artificial Sequence: Synthetic oligonucleotide
acuccuugagcuuguacu

SEQ ID NO: 1808 - RNA, 18 nt, Artificial Sequence
  Description of Artificial Sequence: Synthetic oligonucleotide
ugaguacuccuugagcuu

SEQ ID NO: 1809 - RNA, 18 nt, Artificial Sequence
  Description of Artificial Sequence: Synthetic oligonucleotide
gauuuugaguacuccuug

SEQ ID NO: 1810 - RNA, 18 nt, Artificial Sequence
  Description of Artificial Sequence: Synthetic oligonucleotide
ccaucgauuuugaguacu

SEQ ID NO: 1811 - RNA, 18 nt, Artificial Sequence
  Description of Artificial Sequence: Synthetic oligonucleotide
cucauccaucgauuuuga

SEQ ID NO: 1812 - RNA, 18 nt, Artificial Sequence
  Description of Artificial Sequence: Synthetic oligonucleotide
cggcucucauccaucgau

SEQ ID NO: 1813 - RNA, 18 nt, Artificial Sequence
  Description of Artificial Sequence: Synthetic oligonucleotide
ccagccggcucucaucca

SEQ ID NO: 1814 - RNA, 18 nt, Artificial Sequence
  Description of Artificial Sequence: Synthetic oligonucleotide
ccuauccagccggcucuc

SEQ ID NO: 1815 - RNA, 18 nt, Artificial Sequence
  Description of Artificial Sequence: Synthetic oligonucleotide
cuccuccaccagcaucag

SEQ ID NO: 1816 - RNA, 18 nt, Artificial Sequence
  Description of Artificial Sequence: Synthetic oligonucleotide
agcuccuccuccaccagc

SEQ ID NO: 1817 - RNA, 18 nt, Artificial Sequence
  Description of Artificial Sequence: Synthetic oligonucleotide
ggcgcagcuccuccucca

SEQ ID NO: 1818 - RNA, 18 nt, Artificial Sequence
  Description of Artificial Sequence: Synthetic oligonucleotide
gucccggcgcagcuccuc

SEQ ID NO: 1819 - RNA, 18 nt, Artificial Sequence
  Description of Artificial Sequence: Synthetic oligonucleotide
ggguggucccggcgcagc

SEQ ID NO: 1820 - RNA, 18 nt, Artificial Sequence
  Description of Artificial Sequence: Synthetic oligonucleotide
cggcucagccauggcggg

SEQ ID NO: 1821 - RNA, 18 nt, Artificial Sequence
  Description of Artificial Sequence: Synthetic oligonucleotide
cagcggcucagccauggc

SEQ ID NO: 1822 - RNA, 18 nt, Artificial Sequence
  Description of Artificial Sequence: Synthetic oligonucleotide
ucuggcagcggcucagcc

SEQ ID NO: 1823 - RNA, 18 nt, Artificial Sequence
  Description of Artificial Sequence: Synthetic oligonucleotide
uggguucuggcagcggcu

SEQ ID NO: 1824 - RNA, 18 nt, Artificial Sequence
  Description of Artificial Sequence: Synthetic oligonucleotide
cuucuuggguucuggcag

SEQ ID NO: 1825 - RNA, 18 nt, Artificial Sequence
  Description of Artificial Sequence: Synthetic oligonucleotide
agccucuucuuggguucu

SEQ ID NO: 1826 - RNA, 18 nt, Artificial Sequence
  Description of Artificial Sequence: Synthetic oligonucleotide
cgagcagccucuucuugg

SEQ ID NO: 1827 - RNA, 18 nt, Artificial Sequence
  Description of Artificial Sequence: Synthetic oligonucleotide
agcgucgagcagccucuu

SEQ ID NO: 1828 - RNA, 18 nt, Artificial Sequence
  Description of Artificial Sequence: Synthetic oligonucleotide
auaaaugacauuguaauu

SEQ ID NO: 1829 - RNA, 18 nt, Artificial Sequence
  Description of Artificial Sequence: Synthetic oligonucleotide
agaagauaaaugacauug

SEQ ID NO: 1830 - RNA, 18 nt, Artificial Sequence
  Description of Artificial Sequence: Synthetic oligonucleotide
cacggagaagauaaauga

SEQ ID NO: 1831 - RNA, 18 nt, Artificial Sequence
  Description of Artificial Sequence: Synthetic oligonucleotide
ugggacacggagaagaua

SEQ ID NO: 1832 - RNA, 18 nt, Artificial Sequence
  Description of Artificial Sequence: Synthetic oligonucleotide
gggaugggacacggagaa

SEQ ID NO: 1833 - RNA, 18 nt, Artificial Sequence
  Description of Artificial Sequence: Synthetic oligonucleotide
gacagugggauggauggg

SEQ ID NO: 1834 - RNA, 18 nt, Artificial Sequence
  Description of Artificial Sequence: Synthetic oligonucleotide
cgaaagacagugggaugg

SEQ ID NO: 1835 - RNA, 18 nt, Artificial Sequence
  Description of Artificial Sequence: Synthetic oligonucleotide
gugcacgaaagacagugg

SEQ ID NO: 1836 - RNA, 18 nt, Artificial Sequence
  Description of Artificial Sequence: Synthetic oligonucleotide
agugagugcacgaaagac

SEQ ID NO: 1837 - RNA, 18 nt, Artificial Sequence
  Description of Artificial Sequence: Synthetic oligonucleotide
gguguagugagugcacga

SEQ ID NO: 1838 - RNA, 18 nt, Artificial Sequence
  Description of Artificial Sequence: Synthetic oligonucleotide
uggcugguguagugagug

SEQ ID NO: 1839 - RNA, 18 nt, Artificial Sequence
  Description of Artificial Sequence: Synthetic oligonucleotide
cuagguggcugguguagu

SEQ ID NO: 1840 - RNA, 18 nt, Artificial Sequence
  Description of Artificial Sequence: Synthetic oligonucleotide
gggcuagguggcuggugu

SEQ ID NO: 1841 - RNA, 18 nt, Artificial Sequence
  Description of Artificial Sequence: Synthetic oligonucleotide
gagacagauggugauggg

SEQ ID NO: 1842 - RNA, 18 nt, Artificial Sequence
  Description of Artificial Sequence: Synthetic oligonucleotide
uaugagagacagauggug

SEQ ID NO: 1843 - RNA, 18 nt, Artificial Sequence
  Description of Artificial Sequence: Synthetic oligonucleotide
cagacuaugagagacaga

SEQ ID NO: 1844 - RNA, 18 nt, Artificial Sequence
  Description of Artificial Sequence: Synthetic oligonucleotide
aacagcagacuaugagag

SEQ ID NO: 1845 - RNA, 18 nt, Artificial Sequence
  Description of Artificial Sequence: Synthetic oligonucleotide
ggacaaacagcagacuau

SEQ ID NO: 1846 - RNA, 18 nt, Artificial Sequence
  Description of Artificial Sequence: Synthetic oligonucleotide
ccaguggacaaacagcag

SEQ ID NO: 1847 - RNA, 18 nt, Artificial Sequence
  Description of Artificial Sequence: Synthetic oligonucleotide
agcagccaguggacaaac

SEQ ID NO: 1848 - RNA, 18 nt, Artificial Sequence
  Description of Artificial Sequence: Synthetic oligonucleotide
ccaggagcagccagugga

SEQ ID NO: 1849 - RNA, 18 nt, Artificial Sequence
  Description of Artificial Sequence: Synthetic oligonucleotide
ggcugccaggagcagcca

SEQ ID NO: 1850 - RNA, 18 nt, Artificial Sequence
  Description of Artificial Sequence: Synthetic oligonucleotide
gggcugccaggagcagcc

SEQ ID NO: 1851 - RNA, 18 nt, Artificial Sequence
  Description of Artificial Sequence: Synthetic oligonucleotide
cgaugggaugaagauggg

SEQ ID NO: 1852 - RNA, 18 nt, Artificial Sequence
  Description of Artificial Sequence: Synthetic oligonucleotide
acagacgaugggaugaag

SEQ ID NO: 1853 - RNA, 18 nt, Artificial Sequence
  Description of Artificial Sequence: Synthetic oligonucleotide
aaggcacagacgauggga

SEQ ID NO: 1854 - RNA, 18 nt, Artificial Sequence
  Description of Artificial Sequence: Synthetic oligonucleotide
ugacaaaggcacagacga

SEQ ID NO: 1855 - RNA, 18 nt, Artificial Sequence
  Description of Artificial Sequence: Synthetic oligonucleotide
aggagugacaaaggcaca

SEQ ID NO: 1856 - RNA, 18 nt, Artificial Sequence
  Description of Artificial Sequence: Synthetic oligonucleotide
cugccaggagugacaaag

SEQ ID NO: 1857 - RNA, 18 nt, Artificial Sequence
  Description of Artificial Sequence: Synthetic oligonucleotide
ugacgcugccaggaguga

SEQ ID NO: 1858 - RNA, 18 nt, Artificial Sequence
  Description of Artificial Sequence: Synthetic oligonucleotide
ugggcugacgcugccagg

SEQ ID NO: 1859 - RNA, 18 nt, Artificial Sequence
  Description of Artificial Sequence: Synthetic oligonucleotide
ggaguugggcugacgcug

SEQ ID NO: 1860 - RNA, 18 nt, Artificial Sequence
  Description of Artificial Sequence: Synthetic oligonucleotide
gcacaggaguugggcuga

SEQ ID NO: 1861 - RNA, 18 nt, Artificial Sequence
  Description of Artificial Sequence: Synthetic oligonucleotide
ggaaggcacaggaguugg

SEQ ID NO: 1862 - RNA, 18 nt, Artificial Sequence
  Description of Artificial Sequence: Synthetic oligonucleotide
ggaugggaaggcacagga

SEQ ID NO: 1863 - RNA, 18 nt, Artificial Sequence
  Description of Artificial Sequence: Synthetic oligonucleotide
agacuggaugggaaggca

SEQ ID NO: 1864 - RNA, 18 nt, Artificial Sequence
  Description of Artificial Sequence: Synthetic oligonucleotide
ugggaagacuggauggga

SEQ ID NO: 1865 - RNA, 18 nt, Artificial Sequence
  Description of Artificial Sequence: Synthetic oligonucleotide
aggagugggaagacugga

SEQ ID NO: 1866 - RNA, 18 nt, Artificial Sequence
  Description of Artificial Sequence: Synthetic oligonucleotide
cagagaggagugggaaga

SEQ ID NO: 1867 - RNA, 18 nt, Artificial Sequence
  Description of Artificial Sequence: Synthetic oligonucleotide
agaugcagagaggagugg

SEQ ID NO: 1868 - RNA, 18 nt, Artificial Sequence
  Description of Artificial Sequence: Synthetic oligonucleotide
uccugagaugcagagagg

SEQ ID NO: 1869 - RNA, 18 nt, Artificial Sequence
  Description of Artificial Sequence: Synthetic oligonucleotide
gaagguccugagaugcag

SEQ ID NO: 1870 - RNA, 18 nt, Artificial Sequence
  Description of Artificial Sequence: Synthetic oligonucleotide
guagagaagguccugaga

SEQ ID NO: 1871 - RNA, 18 nt, Artificial Sequence
  Description of Artificial Sequence: Synthetic oligonucleotide
uucugguagagaaggucc

SEQ ID NO: 1872 - RNA, 18 nt, Artificial Sequence
  Description of Artificial Sequence: Synthetic oligonucleotide
caagguucugguagagaa

SEQ ID NO: 1873 - RNA, 18 nt, Artificial Sequence
  Description of Artificial Sequence: Synthetic oligonucleotide
aagaccaagguucuggua

SEQ ID NO: 1874 - RNA, 18 nt, Artificial Sequence
  Description of Artificial Sequence: Synthetic oligonucleotide
gcagaaagaccaagguuc

SEQ ID NO: 1875 - RNA, 18 nt, Artificial Sequence
  Description of Artificial Sequence: Synthetic oligonucleotide
gggcagaaagaccaaggu

SEQ ID NO: 1876 - RNA, 18 nt, Artificial Sequence
  Description of Artificial Sequence: Synthetic oligonucleotide
uucuuggaacuagguggg

SEQ ID NO: 1877 - RNA, 18 nt, Artificial Sequence
  Description of Artificial Sequence: Synthetic oligonucleotide
ggguucuuggaacuaggu

SEQ ID NO: 1878 - RNA, 18 nt, Artificial Sequence
  Description of Artificial Sequence: Synthetic oligonucleotide
ggagugagcaaagaaggg

SEQ ID NO: 1879 - RNA, 18 nt, Artificial Sequence
  Description of Artificial Sequence: Synthetic oligonucleotide
gaauaggagugagcaaag

SEQ ID NO: 1880 - RNA, 18 nt, Artificial Sequence
  Description of Artificial Sequence: Synthetic oligonucleotide
ggcuugaauaggagugag

SEQ ID NO: 1881 - RNA, 18 nt, Artificial Sequence
  Description of Artificial Sequence: Synthetic oligonucleotide
aacguggcuugaauagga

SEQ ID NO: 1882 - RNA, 18 nt, Artificial Sequence
  Description of Artificial Sequence: Synthetic oligonucleotide
ugaacaacguggcuugaa

SEQ ID NO: 1883 - RNA, 18 nt, Artificial Sequence
  Description of Artificial Sequence: Synthetic oligonucleotide
gaagcugaacaacguggc

SEQ ID NO: 1884 - RNA, 18 nt, Artificial Sequence
  Description of Artificial Sequence: Synthetic oligonucleotide
cagaggaagcugaacaac

SEQ ID NO: 1885 - RNA, 18 nt, Artificial Sequence
  Description of Artificial Sequence: Synthetic oligonucleotide
gagcgcagaggaagcuga

SEQ ID NO: 1886 - RNA, 18 nt, Artificial Sequence
  Description of Artificial Sequence: Synthetic oligonucleotide
cccaagagcgcagaggaa

SEQ ID NO: 1887 - RNA, 18 nt, Artificial Sequence
  Description of Artificial Sequence: Synthetic oligonucleotide
ucuggcccaagagcgcag

SEQ ID NO: 1888 - RNA, 18 nt, Artificial Sequence
  Description of Artificial Sequence: Synthetic oligonucleotide
agcccucuggcccaagag

SEQ ID NO: 1889 - RNA, 18 nt, Artificial Sequence
  Description of Artificial Sequence: Synthetic oligonucleotide
cuucuagcccucuggccc

SEQ ID NO: 1890 - RNA, 18 nt, Artificial Sequence
  Description of Artificial Sequence: Synthetic oligonucleotide
agcagcuucuagcccucu

SEQ ID NO: 1891 - RNA, 18 nt, Artificial Sequence
  Description of Artificial Sequence: Synthetic oligonucleotide
aaaacagcagcuucuagc

SEQ ID NO: 1892 - RNA, 18 nt, Artificial Sequence
  Description of Artificial Sequence: Synthetic oligonucleotide
uccagaaaacagcagcuu

SEQ ID NO: 1893 - RNA, 18 nt, Artificial Sequence
  Description of Artificial Sequence: Synthetic oligonucleotide
ucuauuccagaaaacagc

SEQ ID NO: 1894 - RNA, 18 nt, Artificial Sequence
  Description of Artificial Sequence: Synthetic oligonucleotide
ugugcucuauuccagaaa

SEQ ID NO: 1895 - RNA, 18 nt, Artificial Sequence
  Description of Artificial Sequence: Synthetic oligonucleotide
ugcccugugcucuauucc

SEQ ID NO: 1896 - RNA, 18 nt, Artificial Sequence
  Description of Artificial Sequence: Synthetic oligonucleotide
cauacugcccugugcucu

SEQ ID NO: 1897 - RNA, 18 nt, Artificial Sequence
  Description of Artificial Sequence: Synthetic oligonucleotide
cagaucauacugcccugu

SEQ ID NO: 1898 - RNA, 18 nt, Artificial Sequence
  Description of Artificial Sequence: Synthetic oligonucleotide
aacuacagaucauacugc

SEQ ID NO: 1899 - RNA, 18 nt, Artificial Sequence
  Description of Artificial Sequence: Synthetic oligonucleotide
ggagaaacuacagaucau

SEQ ID NO: 1900 - RNA, 18 nt, Artificial Sequence
  Description of Artificial Sequence: Synthetic oligonucleotide
ggccuggagaaacuacag

SEQ ID NO: 1901 - RNA, 18 nt, Artificial Sequence
  Description of Artificial Sequence: Synthetic oligonucleotide
gccagggccuggagaaac

SEQ ID NO: 1902 - RNA, 18 nt, Artificial Sequence
  Description of Artificial Sequence: Synthetic oligonucleotide
uaccggccagggccugga

SEQ ID NO: 1903 - RNA, 18 nt, Artificial Sequence
  Description of Artificial Sequence: Synthetic oligonucleotide
caggguaccggccagggc

SEQ ID NO: 1904 - RNA, 18 nt, Artificial Sequence
  Description of Artificial Sequence: Synthetic oligonucleotide
guuuucaggguaccggcc

SEQ ID NO: 1905 - RNA, 18 nt, Artificial Sequence
  Description of Artificial Sequence: Synthetic oligonucleotide
cccaaguuuucaggguac

SEQ ID NO: 1906 - RNA, 18 nt, Artificial Sequence
  Description of Artificial Sequence: Synthetic oligonucleotide
ggguccccaaguuuucag

SEQ ID NO: 1907 - RNA, 18 nt, Artificial Sequence
  Description of Artificial Sequence: Synthetic oligonucleotide
gugauggguccccaaguu

SEQ ID NO: 1908 - RNA, 18 nt, Artificial Sequence
  Description of Artificial Sequence: Synthetic oligonucleotide
cagaggugaugggucccc

SEQ ID NO: 1909 - RNA, 18 nt, Artificial Sequence
  Description of Artificial Sequence: Synthetic oligonucleotide
gagaacagaggugauggg

SEQ ID NO: 1910 - RNA, 18 nt, Artificial Sequence
  Description of Artificial Sequence: Synthetic oligonucleotide
gccaagagaacagaggug

SEQ ID NO: 1911 - RNA, 18 nt, Artificial Sequence
  Description of Artificial Sequence: Synthetic oligonucleotide
agggagccaagagaacag

SEQ ID NO: 1912 - RNA, 18 nt, Artificial Sequence
  Description of Artificial Sequence: Synthetic oligonucleotide
aaauuagggagccaagag

SEQ ID NO: 1913 - RNA, 18 nt, Artificial Sequence
  Description of Artificial Sequence: Synthetic oligonucleotide
caggaaaauuagggagcc

SEQ ID NO: 1914 - RNA, 18 nt, Artificial Sequence
  Description of Artificial Sequence: Synthetic oligonucleotide
aaaacugagcuugcauuu

SEQ ID NO: 1915 - RNA, 18 nt, Artificial Sequence
  Description of Artificial Sequence: Synthetic oligonucleotide
gaagaaaaacugagcuug

SEQ ID NO: 1916 - RNA, 18 nt, Artificial Sequence
  Description of Artificial Sequence: Synthetic oligonucleotide
aaucugaagaaaaacuga

SEQ ID NO: 1917 - RNA, 18 nt, Artificial Sequence
  Description of Artificial Sequence: Synthetic oligonucleotide
uucauaaucugaagaaaa

SEQ ID NO: 1918 - RNA, 18 nt, Artificial Sequence
  Description of Artificial Sequence: Synthetic oligonucleotide
auuucuucauaaucugaa

SEQ ID NO: 1919 - RNA, 18 nt, Artificial Sequence
  Description of Artificial Sequence: Synthetic oligonucleotide
uuggaauuucuucauaau

SEQ ID NO: 1920 - RNA, 18 nt, Artificial Sequence
  Description of Artificial Sequence: Synthetic oligonucleotide
uggauuuggaauuucuuc

SEQ ID NO: 1921 - RNA, 18 nt, Artificial Sequence
  Description of Artificial Sequence: Synthetic oligonucleotide
cccuguggauuuggaauu

SEQ ID NO: 1922 - RNA, 18 nt, Artificial Sequence
  Description of Artificial Sequence: Synthetic oligonucleotide
caaaccccuguggauuug

SEQ ID NO: 1923 - RNA, 18 nt, Artificial Sequence
  Description of Artificial Sequence: Synthetic oligonucleotide
uaauccaaaccccugugg

SEQ ID NO: 1924 - RNA, 18 nt, Artificial Sequence
  Description of Artificial Sequence: Synthetic oligonucleotide
cucauuaauccaaacccc

SEQ ID NO: 1925 - RNA, 18 nt, Artificial Sequence
  Description of Artificial Sequence: Synthetic oligonucleotide
aaaaccucauuaauccaa

SEQ ID NO: 1926 - RNA, 18 nt, Artificial Sequence
  Description of Artificial Sequence: Synthetic oligonucleotide
acagcaaaaccucauuaa

SEQ ID NO: 1927 - RNA, 18 nt, Artificial Sequence
  Description of Artificial Sequence: Synthetic oligonucleotide
gcaguacagcaaaaccuc

SEQ ID NO: 1928 - RNA, 18 nt, Artificial Sequence
  Description of Artificial Sequence: Synthetic oligonucleotide
gggaggcaguacagcaaa

SEQ ID NO: 1929 - RNA, 18 nt, Artificial Sequence
  Description of Artificial Sequence: Synthetic oligonucleotide
cauguugaggaauaaggg

SEQ ID NO: 1930 - RNA, 18 nt, Artificial Sequence
  Description of Artificial Sequence: Synthetic oligonucleotide
uucauguugaggaauaag

SEQ ID NO: 1931 - RNA, 18 nt, Artificial Sequence
  Description of Artificial Sequence: Synthetic oligonucleotide
ggaacuucauguugagga

SEQ ID NO: 1932 - RNA, 18 nt, Artificial Sequence
  Description of Artificial Sequence: Synthetic oligonucleotide
aggugggaacuucauguu

SEQ ID NO: 1933 - RNA, 18 nt, Artificial Sequence
  Description of Artificial Sequence: Synthetic oligonucleotide
auccgaggugggaacuuc

SEQ ID NO: 1934 - RNA, 18 nt, Artificial Sequence
  Description of Artificial Sequence: Synthetic oligonucleotide
ccccaauccgagguggga

SEQ ID NO: 1935 - RNA, 18 nt, Artificial Sequence
  Description of Artificial Sequence: Synthetic oligonucleotide
cccauccccaauccgagg

SEQ ID NO: 1936 - RNA, 18 nt, Artificial Sequence
  Description of Artificial Sequence: Synthetic oligonucleotide
ucccacccauccccaauc

SEQ ID NO: 1937 - RNA, 18 nt, Artificial Sequence
  Description of Artificial Sequence: Synthetic oligonucleotide
cccccucccacccauccc

SEQ ID NO: 1938 - RNA, 18 nt, Artificial Sequence
  Description of Artificial Sequence: Synthetic oligonucleotide
ugaaacccccucccaccc

SEQ ID NO: 1939 - RNA, 18 nt, Artificial Sequence
  Description of Artificial Sequence: Synthetic oligonucleotide
ccucuugaaacccccucc

SEQ ID NO: 1940 - RNA, 18 nt, Artificial Sequence
  Description of Artificial Sequence: Synthetic oligonucleotide
cuccuccucuugaaaccc

SEQ ID NO: 1941 - RNA, 18 nt, Artificial Sequence
  Description of Artificial Sequence: Synthetic oligonucleotide
ccacccuccuccucuuga

SEQ ID NO: 1942 - RNA, 18 nt, Artificial Sequence
  Description of Artificial Sequence: Synthetic oligonucleotide
ccaucccacccuccuccu

SEQ ID NO: 1943 - RNA, 18 nt, Artificial Sequence
  Description of Artificial Sequence: Synthetic oligonucleotide
cuugcccaucccacccuc

SEQ ID NO: 1944 - RNA, 18 nt, Artificial Sequence
  Description of Artificial Sequence: Synthetic oligonucleotide
uauuccuugcccauccca

SEQ ID NO: 1945 - RNA, 18 nt, Artificial Sequence
  Description of Artificial Sequence: Synthetic oligonucleotide
guguauauuccuugccca

SEQ ID NO: 1946 - RNA, 18 nt, Artificial Sequence
  Description of Artificial Sequence: Synthetic oligonucleotide
caccuguguauauuccuu

SEQ ID NO: 1947 - RNA, 18 nt, Artificial Sequence
  Description of Artificial Sequence: Synthetic oligonucleotide
ggcuucaccuguguauau

SEQ ID NO: 1948 - RNA, 18 nt, Artificial Sequence
  Description of Artificial Sequence: Synthetic oligonucleotide
ucucuggcuucaccugug

SEQ ID NO: 1949 - RNA, 18 nt, Artificial Sequence
  Description of Artificial Sequence: Synthetic oligonucleotide
acccuucucuggcuucac

SEQ ID NO: 1950 - RNA, 18 nt, Artificial Sequence
  Description of Artificial Sequence: Synthetic oligonucleotide
accuaacccuucucuggc

SEQ ID NO: 1951 - RNA, 18 nt, Artificial Sequence
  Description of Artificial Sequence: Synthetic oligonucleotide
ccccaaccuaacccuucu

SEQ ID NO: 1952 - RNA, 18 nt, Artificial Sequence
  Description of Artificial Sequence: Synthetic oligonucleotide
cgcacccccaaccuaacc

SEQ ID NO: 1953 - RNA, 18 nt, Artificial Sequence
  Description of Artificial Sequence: Synthetic oligonucleotide
cccaccgcacccccaacc

SEQ ID NO: 1954 - RNA, 18 nt, Artificial Sequence
  Description of Artificial Sequence: Synthetic oligonucleotide
aaguucccaccgcacccc

SEQ ID NO: 1955 - RNA, 18 nt, Artificial Sequence
  Description of Artificial Sequence: Synthetic oligonucleotide
acagcaaguucccaccgc

SEQ ID NO: 1956 - RNA, 18 nt, Artificial Sequence
  Description of Artificial Sequence: Synthetic oligonucleotide
ucaaaacagcaaguuccc

SEQ ID NO: 1957 - RNA, 18 nt, Artificial Sequence
  Description of Artificial Sequence: Synthetic oligonucleotide
ccagaucaaaacagcaag

SEQ ID NO: 1958 - RNA, 18 nt, Artificial Sequence
  Description of Artificial Sequence: Synthetic oligonucleotide
ggaaaccagaucaaaaca

SEQ ID NO: 1959 - RNA, 18 nt, Artificial Sequence
  Description of Artificial Sequence: Synthetic oligonucleotide
caccaggaaaccagauca

SEQ ID NO: 1960 - RNA, 18 nt, Artificial Sequence
  Description of Artificial Sequence: Synthetic oligonucleotide
ugucacaccaggaaacca

SEQ ID NO: 1961 - RNA, 18 nt, Artificial Sequence
  Description of Artificial Sequence: Synthetic oligonucleotide
cagagugucacaccagga

SEQ ID NO: 1962 - RNA, 18 nt, Artificial Sequence
  Description of Artificial Sequence: Synthetic oligonucleotide
uaacccagagugucacac

SEQ ID NO: 1963 - RNA, 18 nt, Artificial Sequence
  Description of Artificial Sequence: Synthetic oligonucleotide
gccuuuaacccagagugu

SEQ ID NO: 1964 - RNA, 18 nt, Artificial Sequence
  Description of Artificial Sequence: Synthetic oligonucleotide
uucaagccuuuaacccag

SEQ ID NO: 1965 - RNA, 18 nt, Artificial Sequence
  Description of Artificial Sequence: Synthetic oligonucleotide
gggccuucaagccuuuaa

SEQ ID NO: 1966 - RNA, 18 nt, Artificial Sequence
  Description of Artificial Sequence: Synthetic oligonucleotide
ccuagacuccuaacaggg

SEQ ID NO: 1967 - RNA, 18 nt, Artificial Sequence
  Description of Artificial Sequence: Synthetic oligonucleotide
ccccuagacuccuaacag

SEQ ID NO: 1968 - RNA, 18 nt, Artificial Sequence
  Description of Artificial Sequence: Synthetic oligonucleotide
ucucaccccuagacuccu

SEQ ID NO: 1969 - RNA, 18 nt, Artificial Sequence
  Description of Artificial Sequence: Synthetic oligonucleotide
gagaaucucaccccuaga

SEQ ID NO: 1970 - RNA, 18 nt, Artificial Sequence
  Description of Artificial Sequence: Synthetic oligonucleotide
gagaagagaaucucaccc

SEQ ID NO: 1971 - RNA, 18 nt, Artificial Sequence
  Description of Artificial Sequence: Synthetic oligonucleotide
ucagagagaagagaaucu

SEQ ID NO: 1972 - RNA, 18 nt, Artificial Sequence
  Description of Artificial Sequence: Synthetic oligonucleotide
ugggaucagagagaagag

SEQ ID NO: 1973 - RNA, 18 nt, Artificial Sequence
  Description of Artificial Sequence: Synthetic oligonucleotide
uccucugggaucagagag

SEQ ID NO: 1974 - RNA, 18 nt, Artificial Sequence
  Description of Artificial Sequence: Synthetic oligonucleotide
uaacguccucugggauca

SEQ ID NO: 1975 - RNA, 18 nt, Artificial Sequence
  Description of Artificial Sequence: Synthetic oligonucleotide
gaaguuaacguccucugg

SEQ ID NO: 1976 - RNA, 18 nt, Artificial Sequence
  Description of Artificial Sequence: Synthetic oligonucleotide
caguagaaguuaacgucc

SEQ ID NO: 1977 - RNA, 18 nt, Artificial Sequence
  Description of Artificial Sequence: Synthetic oligonucleotide
accugcaguagaaguuaa

SEQ ID NO: 1978 - RNA, 18 nt, Artificial Sequence
  Description of Artificial Sequence: Synthetic oligonucleotide
uucucaccugcaguagaa

SEQ ID NO: 1979 - RNA, 18 nt, Artificial Sequence
  Description of Artificial Sequence: Synthetic oligonucleotide
uuuguuucucaccugcag

SEQ ID NO: 1980 - RNA, 18 nt, Artificial Sequence
  Description of Artificial Sequence: Synthetic oligonucleotide
ccuauuuuguuucucacc

SEQ ID NO: 1981 - RNA, 18 nt, Artificial Sequence
  Description of Artificial Sequence: Synthetic oligonucleotide
auccuccuauuuuguuuc

SEQ ID NO: 1982 - RNA, 18 nt, Artificial Sequence
  Description of Artificial Sequence: Synthetic oligonucleotide
ccaccauccuccuauuuu

SEQ ID NO: 1983 - RNA, 18 nt, Artificial Sequence
  Description of Artificial Sequence: Synthetic oligonucleotide
aguccccaccauccuccu

SEQ ID NO: 1984 - RNA, 18 nt, Artificial Sequence
  Description of Artificial Sequence: Synthetic oligonucleotide
aggacaguccccaccauc

SEQ ID NO: 1985 - RNA, 18 nt, Artificial Sequence
  Description of Artificial Sequence: Synthetic oligonucleotide
cucccaggacagucccca

SEQ ID NO: 1986 - RNA, 18 nt, Artificial Sequence
  Description of Artificial Sequence: Synthetic oligonucleotide
cccuccucccaggacagu

SEQ ID NO: 1987 - RNA, 18 nt, Artificial Sequence
  Description of Artificial Sequence: Synthetic oligonucleotide
ccacccccuccucccagg

SEQ ID NO: 1988 - RNA, 18 nt, Artificial Sequence
  Description of Artificial Sequence: Synthetic oligonucleotide
auggaccacccccuccuc

SEQ ID NO: 1989 - RNA, 18 nt, Artificial Sequence
  Description of Artificial Sequence: Synthetic oligonucleotide
aagccauggaccaccccc

SEQ ID NO: 1990 - RNA, 18 nt, Artificial Sequence
  Description of Artificial Sequence: Synthetic oligonucleotide
accacaagccauggacca

SEQ ID NO: 1991 - RNA, 18 nt, Artificial Sequence
  Description of Artificial Sequence: Synthetic oligonucleotide
cccacaccacaagccaug

SEQ ID NO: 1992 - RNA, 18 nt, Artificial Sequence
  Description of Artificial Sequence: Synthetic oligonucleotide
gccagcccacaccacaag

SEQ ID NO: 1993 - RNA, 18 nt, Artificial Sequence
  Description of Artificial Sequence: Synthetic oligonucleotide
cuauagccagcccacacc

SEQ ID NO: 1994 - RNA, 18 nt, Artificial Sequence
  Description of Artificial Sequence: Synthetic oligonucleotide
cuccccuauagccagccc

SEQ ID NO: 1995 - RNA, 18 nt, Artificial Sequence
  Description of Artificial Sequence: Synthetic oligonucleotide
guggccuccccuauagcc

SEQ ID NO: 1996 - RNA, 18 nt, Artificial Sequence
  Description of Artificial Sequence: Synthetic oligonucleotide
uagcaguggccuccccua

SEQ ID NO: 1997 - RNA, 18 nt, Artificial Sequence
  Description of Artificial Sequence: Synthetic oligonucleotide
uccccuagcaguggccuc

SEQ ID NO: 1998 - RNA, 18 nt, Artificial Sequence
  Description of Artificial Sequence: Synthetic oligonucleotide
gccaguccccuagcagug

SEQ ID NO: 1999 - RNA, 18 nt, Artificial Sequence
  Description of Artificial Sequence: Synthetic oligonucleotide
uggaugccaguccccuag

SEQ ID NO: 2000 - RNA, 18 nt, Artificial Sequence
  Description of Artificial Sequence: Synthetic oligonucleotide
gggccuggaugccagucc

SEQ ID NO: 2001 - RNA, 18 nt, Artificial Sequence
  Description of Artificial Sequence: Synthetic oligonucleotide
auugagacgcuucaaggg

SEQ ID NO: 2002 - RNA, 18 nt, Artificial Sequence
  Description of Artificial Sequence: Synthetic oligonucleotide
uuauugagacgcuucaag

SEQ ID NO: 2003 - RNA, 18 nt, Artificial Sequence
  Description of Artificial Sequence: Synthetic oligonucleotide
cggacuuauugagacgcu

SEQ ID NO: 2004 - RNA, 18 nt, Artificial Sequence
  Description of Artificial Sequence: Synthetic oligonucleotide
gagcgcggacuuauugag

SEQ ID NO: 2005 - RNA, 18 nt, Artificial Sequence
  Description of Artificial Sequence: Synthetic oligonucleotide
aaggagagcgcggacuua

SEQ ID NO: 2006 - RNA, 18 nt, Artificial Sequence
  Description of Artificial Sequence: Synthetic oligonucleotide
gguuuguuggacccaagg

SEQ ID NO: 2007 - RNA, 18 nt, Artificial Sequence
  Description of Artificial Sequence: Synthetic oligonucleotide
acgcggguuuguuggacc

SEQ ID NO: 2008 - RNA, 18 nt, Artificial Sequence
  Description of Artificial Sequence: Synthetic oligonucleotide
gucacacgcggguuuguu

SEQ ID NO: 2009 - RNA, 18 nt, Artificial Sequence
  Description of Artificial Sequence: Synthetic oligonucleotide
ccagcgucacacgcgggu

SEQ ID NO: 2010 - RNA, 18 nt, Artificial Sequence
  Description of Artificial Sequence: Synthetic oligonucleotide
gggccagcgucacacgcg

SEQ ID NO: 2011 - RNA, 18 nt, Artificial Sequence
  Description of Artificial Sequence: Synthetic oligonucleotide
aggccauuccacgguggg

SEQ ID NO: 2012 - RNA, 18 nt, Artificial Sequence
  Description of Artificial Sequence: Synthetic oligonucleotide
gggccaggccauuccacg

SEQ ID NO: 2013 - RNA, 18 nt, Artificial Sequence
  Description of Artificial Sequence: Synthetic oligonucleotide
uccguaaucugcagccgg

SEQ ID NO: 2014 - RNA, 18 nt, Artificial Sequence
  Description of Artificial Sequence: Synthetic oligonucleotide
cguucuccguaaucugca

SEQ ID NO: 2015 - RNA, 18 nt, Artificial Sequence
  Description of Artificial Sequence: Synthetic oligonucleotide
cucgccguucuccguaau

SEQ ID NO: 2016 - RNA, 18 nt, Artificial Sequence
  Description of Artificial Sequence: Synthetic oligonucleotide
cggaacucgccguucucc

SEQ ID NO: 2017 - RNA, 18 nt, Artificial Sequence
  Description of Artificial Sequence: Synthetic oligonucleotide
uguuucggaacucgccgu

SEQ ID NO: 2018 - RNA, 18 nt, Artificial Sequence
  Description of Artificial Sequence: Synthetic oligonucleotide
ugcgguguuucggaacuc

SEQ ID NO: 2019 - RNA, 18 nt, Artificial Sequence
  Description of Artificial Sequence: Synthetic oligonucleotide
uggucugcgguguuucgg

SEQ ID NO: 2020 - RNA, 18 nt, Artificial Sequence
  Description of Artificial Sequence: Synthetic oligonucleotide
gcuaguggucugcggugu

SEQ ID NO: 2021 - RNA, 18 nt, Artificial Sequence
  Description of Artificial Sequence: Synthetic oligonucleotide
ggugggcuaguggucugc

SEQ ID NO: 2022 - RNA, 18 nt, Artificial Sequence
  Description of Artificial Sequence: Synthetic oligonucleotide
ugcugggugggcuagugg

SEQ ID NO: 2023 - RNA, 18 nt, Artificial Sequence
  Description of Artificial Sequence: Synthetic oligonucleotide
ucugaugcugggugggcu

SEQ ID NO: 2024 - RNA, 18 nt, Artificial Sequence
  Description of Artificial Sequence: Synthetic oligonucleotide
aggucucugaugcugggu

SEQ ID NO: 2025 - RNA, 18 nt, Artificial Sequence
  Description of Artificial Sequence: Synthetic oligonucleotide
agagaaggucucugaugc

SEQ ID NO: 2026 - RNA, 18 nt, Artificial Sequence
  Description of Artificial Sequence: Synthetic oligonucleotide
aaggaagagaaggucucu

SEQ ID NO: 2027 - RNA, 18 nt, Artificial Sequence
  Description of Artificial Sequence: Synthetic oligonucleotide
caggaaaggaagagaagg

SEQ ID NO: 2028 - RNA, 18 nt, Artificial Sequence
  Description of Artificial Sequence: Synthetic oligonucleotide
gugcacaggaaaggaaga

SEQ ID NO: 2029 - RNA, 18 nt, Artificial Sequence
  Description of Artificial Sequence: Synthetic oligonucleotide
gggugcacaggaaaggaa

SEQ ID NO: 2030 - RNA, 18 nt, Artificial Sequence
  Description of Artificial Sequence: Synthetic oligonucleotide
gugcuguuacaggguggg

SEQ ID NO: 2031 - RNA, 18 nt, Artificial Sequence
  Description of Artificial Sequence: Synthetic oligonucleotide
gguuggugcuguuacagg

SEQ ID NO: 2032 - RNA, 18 nt, Artificial Sequence
  Description of Artificial Sequence: Synthetic oligonucleotide
cuggugguuggugcuguu

SEQ ID NO: 2033 - RNA, 18 nt, Artificial Sequence
  Description of Artificial Sequence: Synthetic oligonucleotide
caauccuggugguuggug

SEQ ID NO: 2034 - RNA, 18 nt, Artificial Sequence
  Description of Artificial Sequence: Synthetic oligonucleotide
auguccaauccugguggu

SEQ ID NO: 2035 - RNA, 18 nt, Artificial Sequence
  Description of Artificial Sequence: Synthetic oligonucleotide
cggugauguccaauccug

SEQ ID NO: 2036 - RNA, 18 nt, Artificial Sequence
  Description of Artificial Sequence: Synthetic oligonucleotide
uuccucggugauguccaa

SEQ ID NO: 2037 - RNA, 18 nt, Artificial Sequence
  Description of Artificial Sequence: Synthetic oligonucleotide
cgcuguuccucggugaug

SEQ ID NO: 2038 - RNA, 18 nt, Artificial Sequence
  Description of Artificial Sequence: Synthetic oligonucleotide
aaucccgcuguuccucgg

SEQ ID NO: 2039 - RNA, 18 nt, Artificial Sequence
  Description of Artificial Sequence: Synthetic oligonucleotide
gaggcaaucccgcuguuc

SEQ ID NO: 2040 - RNA, 18 nt, Artificial Sequence
  Description of Artificial Sequence: Synthetic oligonucleotide
gggaggcaaucccgcugu

SEQ ID NO: 2041 - RNA, 18 nt, Artificial Sequence
  Description of Artificial Sequence: Synthetic oligonucleotide
cccagggaggcauucggg

SEQ ID NO: 2042 - RNA, 18 nt, Artificial Sequence
  Description of Artificial Sequence: Synthetic oligonucleotide
ugccucccagggaggcau

SEQ ID NO: 2043 - RNA, 18 nt, Artificial Sequence
  Description of Artificial Sequence: Synthetic oligonucleotide
cagugugccucccaggga

SEQ ID NO: 2044 - RNA, 18 nt, Artificial Sequence
  Description of Artificial Sequence: Synthetic oligonucleotide
gcaaucagugugccuccc

SEQ ID NO: 2045 - RNA, 18 nt, Artificial Sequence
  Description of Artificial Sequence: Synthetic oligonucleotide
ggugggcaaucagugugc

SEQ ID NO: 2046 - RNA, 18 nt, Artificial Sequence
  Description of Artificial Sequence: Synthetic oligonucleotide
gggugggcaaucagugug

SEQ ID NO: 2047 - RNA, 18 nt, Artificial Sequence
  Description of Artificial Sequence: Synthetic oligonucleotide
aaauggugcagugguggg

SEQ ID NO: 2048 - RNA, 18 nt, Artificial Sequence
  Description of Artificial Sequence: Synthetic oligonucleotide
ccuggaaauggugcagug

SEQ ID NO: 2049 - RNA, 18 nt, Artificial Sequence
  Description of Artificial Sequence: Synthetic oligonucleotide
ucccuccuggaaauggug

SEQ ID NO: 2050 - RNA, 18 nt, Artificial Sequence
  Description of Artificial Sequence: Synthetic oligonucleotide
cacucucccuccuggaaa

SEQ ID NO: 2051 - RNA, 18 nt, Artificial Sequence
  Description of Artificial Sequence: Synthetic oligonucleotide
guccccacucucccuccu

SEQ ID NO: 2052 - RNA, 18 nt, Artificial Sequence
  Description of Artificial Sequence: Synthetic oligonucleotide
ugaggguccccacucucc

SEQ ID NO: 2053 - RNA, 18 nt, Artificial Sequence
  Description of Artificial Sequence: Synthetic oligonucleotide
gcggcugaggguccccac

SEQ ID NO: 2054 - RNA, 18 nt, Artificial Sequence
  Description of Artificial Sequence: Synthetic oligonucleotide
gggcggcugagggucccc

SEQ ID NO: 2055 - RNA, 18 nt, Artificial Sequence
  Description of Artificial Sequence: Synthetic oligonucleotide
caaugggaaggaaaaggg

SEQ ID NO: 2056 - RNA, 18 nt, Artificial Sequence
  Description of Artificial Sequence: Synthetic oligonucleotide
caccccaaugggaaggaa

SEQ ID NO: 2057 - RNA, 18 nt, Artificial Sequence
  Description of Artificial Sequence: Synthetic oligonucleotide
ggcagcaccccaauggga

SEQ ID NO: 2058 - RNA, 18 nt, Artificial Sequence
  Description of Artificial Sequence: Synthetic oligonucleotide
gagagggcagcaccccaa

SEQ ID NO: 2059 - RNA, 18 nt, Artificial Sequence
  Description of Artificial Sequence: Synthetic oligonucleotide
ucaaagagagggcagcac

SEQ ID NO: 2060 - RNA, 18 nt, Artificial Sequence
  Description of Artificial Sequence: Synthetic oligonucleotide
gggucaaagagagggcag

SEQ ID NO: 2061 - RNA, 18 nt, Artificial Sequence
  Description of Artificial Sequence: Synthetic oligonucleotide
gguaggcgguguccuggg

SEQ ID NO: 2062 - RNA, 18 nt, Artificial Sequence
  Description of Artificial Sequence: Synthetic oligonucleotide
ggguaggcgguguccugg

SEQ ID NO: 2063 - RNA, 18 nt, Artificial Sequence
  Description of Artificial Sequence: Synthetic oligonucleotide
gcaccccggagugaaggg

SEQ ID NO: 2064 - RNA, 18 nt, Artificial Sequence
  Description of Artificial Sequence: Synthetic oligonucleotide
ggauagcaccccggagug

SEQ ID NO: 2065 - RNA, 18 nt, Artificial Sequence
  Description of Artificial Sequence: Synthetic oligonucleotide
gggauagcaccccggagu

SEQ ID NO: 2066 - RNA, 18 nt, Artificial Sequence
  Description of Artificial Sequence: Synthetic oligonucleotide
gaugaggcagaggauggg

SEQ ID NO: 2067 - RNA, 18 nt, Artificial Sequence
  Description of Artificial Sequence: Synthetic oligonucleotide
ggaacgaugaggcagagg

SEQ ID NO: 2068 - RNA, 18 nt, Artificial Sequence
  Description of Artificial Sequence: Synthetic oligonucleotide
gggaacgaugaggcagag

SEQ ID NO: 2069 - RNA, 18 nt, Artificial Sequence
  Description of Artificial Sequence: Synthetic oligonucleotide
gucccccagugcucaggg

SEQ ID NO: 2070 - RNA, 18 nt, Artificial Sequence
  Description of Artificial Sequence: Synthetic oligonucleotide
ggucugucccccagugcu

SEQ ID NO: 2071 - RNA, 18 nt, Artificial Sequence
  Description of Artificial Sequence: Synthetic oligonucleotide
gugagggucuguccccca

SEQ ID NO: 2072 - RNA, 18 nt, Artificial Sequence
  Description of Artificial Sequence: Synthetic oligonucleotide
gggugagggucugucccc

SEQ ID NO: 2073 - RNA, 18 nt, Artificial Sequence
  Description of Artificial Sequence: Synthetic oligonucleotide
ccacacccccaggguggg

SEQ ID NO: 2074 - RNA, 18 nt, Artificial Sequence
  Description of Artificial Sequence: Synthetic oligonucleotide
aggugccacacccccagg

SEQ ID NO: 2075 - RNA, 18 nt, Artificial Sequence
  Description of Artificial Sequence: Synthetic oligonucleotide
uuuggaggugccacaccc

SEQ ID NO: 2076 - RNA, 18 nt, Artificial Sequence
  Description of Artificial Sequence: Synthetic oligonucleotide
gaaaguuuggaggugcca

SEQ ID NO: 2077 - RNA, 18 nt, Artificial Sequence
  Description of Artificial Sequence: Synthetic oligonucleotide
aaguugaaaguuuggagg

SEQ ID NO: 2078 - RNA, 18 nt, Artificial Sequence
  Description of Artificial Sequence: Synthetic oligonucleotide
cccugaaguugaaaguuu

SEQ ID NO: 2079 - RNA, 18 nt, Artificial Sequence
  Description of Artificial Sequence: Synthetic oligonucleotide
aaucacccugaaguugaa

SEQ ID NO: 2080 - RNA, 18 nt, Artificial Sequence
  Description of Artificial Sequence: Synthetic oligonucleotide
aaaaaaaucacccugaag

SEQ ID NO: 2081 - RNA, 18 nt, Artificial Sequence
  Description of Artificial Sequence: Synthetic oligonucleotide
cugcuaaaaaaaucaccc

SEQ ID NO: 2082 - RNA, 18 nt, Artificial Sequence
  Description of Artificial Sequence: Synthetic oligonucleotide
gguuacugcuaaaaaaau

SEQ ID NO: 2083 - RNA, 18 nt, Artificial Sequence
  Description of Artificial Sequence: Synthetic oligonucleotide
gcucugguuacugcuaaa

SEQ ID NO: 2084 - RNA, 18 nt, Artificial Sequence
  Description of Artificial Sequence: Synthetic oligonucleotide
ugucagcucugguuacug

SEQ ID NO: 2085 - RNA, 18 nt, Artificial Sequence
  Description of Artificial Sequence: Synthetic oligonucleotide
uagauugucagcucuggu

SEQ ID NO: 2086 - RNA, 18 nt, Artificial Sequence
  Description of Artificial Sequence: Synthetic oligonucleotide
ggaguuagauugucagcu

SEQ ID NO: 2087 - RNA, 18 nt, Artificial Sequence
  Description of Artificial Sequence: Synthetic oligonucleotide
gggaguuagauugucagc

SEQ ID NO: 2088 - RNA, 18 nt, Artificial Sequence
  Description of Artificial Sequence: Synthetic oligonucleotide
cccuccccauaacaaggg

SEQ ID NO: 2089 - RNA, 18 nt, Artificial Sequence
  Description of Artificial Sequence: Synthetic oligonucleotide
ggguccccuccccauaac

SEQ ID NO: 2090 - RNA, 18 nt, Artificial Sequence
  Description of Artificial Sequence: Synthetic oligonucleotide
uaauagggcccccucacc

SEQ ID NO: 2091 - RNA, 18 nt, Artificial Sequence
  Description of Artificial Sequence: Synthetic oligonucleotide
ggguaauagggcccccuc

SEQ ID NO: 2092 - RNA, 18 nt, Artificial Sequence
  Description of Artificial Sequence: Synthetic oligonucleotide
cuccugagaaaucaaggg

SEQ ID NO: 2093 - RNA, 18 nt, Artificial Sequence
  Description of Artificial Sequence: Synthetic oligonucleotide
agacgcuccugagaaauc

SEQ ID NO: 2094 - RNA, 18 nt, Artificial Sequence
  Description of Artificial Sequence: Synthetic oligonucleotide
cccccagacgcuccugag

SEQ ID NO: 2095 - RNA, 18 nt, Artificial Sequence
  Description of Artificial Sequence: Synthetic oligonucleotide
gagcccccccagacgcuc

SEQ ID NO: 2096 - RNA, 18 nt, Artificial Sequence
  Description of Artificial Sequence: Synthetic oligonucleotide
gugcugagcccccccaga

SEQ ID NO: 2097 - RNA, 18 nt, Artificial Sequence
  Description of Artificial Sequence: Synthetic oligonucleotide
ugugcgugcugagccccc

SEQ ID NO: 2098 - RNA, 18 nt, Artificial Sequence
  Description of Artificial Sequence: Synthetic oligonucleotide
gaguuugugcgugcugag

SEQ ID NO: 2099 - RNA, 18 nt, Artificial Sequence
  Description of Artificial Sequence: Synthetic oligonucleotide
agaaggaguuugugcgug

SEQ ID NO: 2100 - RNA, 18 nt, Artificial Sequence
  Description of Artificial Sequence: Synthetic oligonucleotide
gaaggagaaggaguuugu

SEQ ID NO: 2101 - RNA, 18 nt, Artificial Sequence
  Description of Artificial Sequence: Synthetic oligonucleotide
ugguagaaggagaaggag

SEQ ID NO: 2102 - RNA, 18 nt, Artificial Sequence
  Description of Artificial Sequence: Synthetic oligonucleotide
aagagugguagaaggaga

SEQ ID NO: 2103 - RNA, 18 nt, Artificial Sequence
  Description of Artificial Sequence: Synthetic oligonucleotide
aauuuaagagugguagaa

SEQ ID NO: 2104 - RNA, 18 nt, Artificial Sequence
  Description of Artificial Sequence: Synthetic oligonucleotide
gaguaaauuuaagagugg

SEQ ID NO: 2105 - RNA, 18 nt, Artificial Sequence
  Description of Artificial Sequence: Synthetic oligonucleotide
ggagggaguaaauuuaag

SEQ ID NO: 2106 - RNA, 18 nt, Artificial Sequence
  Description of Artificial Sequence: Synthetic oligonucleotide
gggagggaguaaauuuaa

SEQ ID NO: 2107 - RNA, 18 nt, Artificial Sequence
  Description of Artificial Sequence: Synthetic oligonucleotide
aucuggguucuggguggg

SEQ ID NO: 2108 - RNA, 18 nt, Artificial Sequence
  Description of Artificial Sequence: Synthetic oligonucleotide
accccaucuggguucugg

SEQ ID NO: 2109 - RNA, 18 nt, Artificial Sequence
  Description of Artificial Sequence: Synthetic oligonucleotide
ccuccaccccaucugggu

SEQ ID NO: 2110 - RNA, 18 nt, Artificial Sequence
  Description of Artificial Sequence: Synthetic oligonucleotide
ggcccccuccaccccauc

SEQ ID NO: 2111 - RNA, 18 nt, Artificial Sequence
  Description of Artificial Sequence: Synthetic oligonucleotide
ccgguggcccccuccacc

SEQ ID NO: 2112 - RNA, 18 nt, Artificial Sequence
  Description of Artificial Sequence: Synthetic oligonucleotide
cugccccgguggcccccu

SEQ ID NO: 2113 - RNA, 18 nt, Artificial Sequence
  Description of Artificial Sequence: Synthetic oligonucleotide
ccucccugccccgguggc

SEQ ID NO: 2114 - RNA, 18 nt, Artificial Sequence
  Description of Artificial Sequence: Synthetic oligonucleotide
cgcccccucccugccccg

SEQ ID NO: 2115 - RNA, 18 nt, Artificial Sequence
  Description of Artificial Sequence: Synthetic oligonucleotide
cuugccgcccccucccug

SEQ ID NO: 2116 - RNA, 18 nt, Artificial Sequence
  Description of Artificial Sequence: Synthetic oligonucleotide
ccccccuugccgcccccu

SEQ ID NO: 2117 - RNA, 18 nt, Artificial Sequence
  Description of Artificial Sequence: Synthetic oligonucleotide
ccauuccccccuugccgc

SEQ ID NO: 2118 - RNA, 18 nt, Artificial Sequence
  Description of Artificial Sequence: Synthetic oligonucleotide
aacucccauuccccccuu

SEQ ID NO: 2119 - RNA, 18 nt, Artificial Sequence
  Description of Artificial Sequence: Synthetic oligonucleotide
gagacaacucccauuccc

SEQ ID NO: 2120 - RNA, 18 nt, Artificial Sequence
  Description of Artificial Sequence: Synthetic oligonucleotide
gggagacaacucccauuc

SEQ ID NO: 2121 - RNA, 18 nt, Artificial Sequence
  Description of Artificial Sequence: Synthetic oligonucleotide
gagcagaucagguguggg

SEQ ID NO: 2122 - RNA, 18 nt, Artificial Sequence
  Description of Artificial Sequence: Synthetic oligonucleotide
gccgagagcagaucaggu

SEQ ID NO: 2123 - RNA, 18 nt, Artificial Sequence
  Description of Artificial Sequence: Synthetic oligonucleotide
gaccagccgagagcagau

SEQ ID NO: 2124 - RNA, 18 nt, Artificial Sequence
  Description of Artificial Sequence: Synthetic oligonucleotide
ucugggaccagccgagag

SEQ ID NO: 2125 - RNA, 18 nt, Artificial Sequence
  Description of Artificial Sequence: Synthetic oligonucleotide
cccgcucugggaccagcc

SEQ ID NO: 2126 - RNA, 18 nt, Artificial Sequence
  Description of Artificial Sequence: Synthetic oligonucleotide
cucaccccgcucugggac

SEQ ID NO: 2127 - RNA, 18 nt, Artificial Sequence
  Description of Artificial Sequence: Synthetic oligonucleotide
gcccccucaccccgcucu

SEQ ID NO: 2128 - RNA, 18 nt, Artificial Sequence
  Description of Artificial Sequence: Synthetic oligonucleotide
cauaagcccccucacccc

SEQ ID NO: 2129 - RNA, 18 nt, Artificial Sequence
  Description of Artificial Sequence: Synthetic oligonucleotide
gggcauaagcccccucac

SEQ ID NO: 2130 - RNA, 18 nt, Artificial Sequence
  Description of Artificial Sequence: Synthetic oligonucleotide
cccacccaacacacuggg

SEQ ID NO: 2131 - RNA, 18 nt, Artificial Sequence
  Description of Artificial Sequence: Synthetic oligonucleotide
uccaccccacccaacaca

SEQ ID NO: 2132 - RNA, 18 nt, Artificial Sequence
  Description of Artificial Sequence: Synthetic oligonucleotide
ucaauuccaccccaccca

SEQ ID NO: 2133 - RNA, 18 nt, Artificial Sequence
  Description of Artificial Sequence: Synthetic oligonucleotide
uaaccucaauuccacccc

SEQ ID NO: 2134 - RNA, 18 nt, Artificial Sequence
  Description of Artificial Sequence: Synthetic oligonucleotide
cacccuaaccucaauucc

SEQ ID NO: 2135 - RNA, 18 nt, Artificial Sequence
  Description of Artificial Sequence: Synthetic oligonucleotide
ccccucacccuaaccuca

SEQ ID NO: 2136 - RNA, 18 nt, Artificial Sequence
  Description of Artificial Sequence: Synthetic oligonucleotide
ccugaccccucacccuaa

SEQ ID NO: 2137 - RNA, 18 nt, Artificial Sequence
  Description of Artificial Sequence: Synthetic oligonucleotide
uaaacccugaccccucac

SEQ ID NO: 2138 - RNA, 18 nt, Artificial Sequence
  Description of Artificial Sequence: Synthetic oligonucleotide
ccuccuaaacccugaccc

SEQ ID NO: 2139 - RNA, 18 nt, Artificial Sequence
  Description of Artificial Sequence: Synthetic oligonucleotide
cacacccuccuaaacccu

SEQ ID NO: 2140 - RNA, 18 nt, Artificial Sequence
  Description of Artificial Sequence: Synthetic oligonucleotide
acauacacacccuccuaa

SEQ ID NO: 2141 - RNA, 18 nt, Artificial Sequence
  Description of Artificial Sequence: Synthetic oligonucleotide
ucccaacauacacacccu

SEQ ID NO: 2142 - RNA, 18 nt, Artificial Sequence
  Description of Artificial Sequence: Synthetic oligonucleotide
uguccucccaacauacac

SEQ ID NO: 2143 - RNA, 18 nt, Artificial Sequence
  Description of Artificial Sequence: Synthetic oligonucleotide
uagccuguccucccaaca

SEQ ID NO: 2144 - RNA, 18 nt, Artificial Sequence
  Description of Artificial Sequence: Synthetic oligonucleotide
ucaacuagccuguccucc

SEQ ID NO: 2145 - RNA, 18 nt, Artificial Sequence
  Description of Artificial Sequence: Synthetic oligonucleotide
acagaucaacuagccugu

SEQ ID NO: 2146 - RNA, 18 nt, Artificial Sequence
  Description of Artificial Sequence: Synthetic oligonucleotide
guaggacagaucaacuag

SEQ ID NO: 2147 - RNA, 18 nt, Artificial Sequence
  Description of Artificial Sequence: Synthetic oligonucleotide
ucagaguaggacagauca

SEQ ID NO: 2148 - RNA, 18 nt, Artificial Sequence
  Description of Artificial Sequence: Synthetic oligonucleotide
gugugucagaguaggaca

SEQ ID NO: 2149 - RNA, 18 nt, Artificial Sequence
  Description of Artificial Sequence: Synthetic oligonucleotide
ggacugugugucagagua

SEQ ID NO: 2150 - RNA, 18 nt, Artificial Sequence
  Description of Artificial Sequence: Synthetic oligonucleotide
gggacugugugucagagu

SEQ ID NO: 2151 - RNA, 18 nt, Artificial Sequence
  Description of Artificial Sequence: Synthetic oligonucleotide
agaagagagaaggaaggg

SEQ ID NO: 2152 - RNA, 18 nt, Artificial Sequence
  Description of Artificial Sequence: Synthetic oligonucleotide
gaccaagaagagagaagg

SEQ ID NO: 2153 - RNA, 18 nt, Artificial Sequence
  Description of Artificial Sequence: Synthetic oligonucleotide
guagagaccaagaagaga

SEQ ID NO: 2154 - RNA, 18 nt, Artificial Sequence
  Description of Artificial Sequence: Synthetic oligonucleotide
ugggaguagagaccaaga

SEQ ID NO: 2155 - RNA, 18 nt, Artificial Sequence
  Description of Artificial Sequence: Synthetic oligonucleotide
cccccugggaguagagac

SEQ ID NO: 2156 - RNA, 18 nt, Artificial Sequence
  Description of Artificial Sequence: Synthetic oligonucleotide
ccccucccccugggagua

SEQ ID NO: 2157 - RNA, 18 nt, Artificial Sequence
  Description of Artificial Sequence: Synthetic oligonucleotide
guuccccccucccccugg

SEQ ID NO: 2158 - RNA, 18 nt, Artificial Sequence
  Description of Artificial Sequence: Synthetic oligonucleotide
aguaaguuccccccuccc

SEQ ID NO: 2159 - RNA, 18 nt, Artificial Sequence
  Description of Artificial Sequence: Synthetic oligonucleotide
ccuagaguaaguuccccc

SEQ ID NO: 2160 - RNA, 18 nt, Artificial Sequence
  Description of Artificial Sequence: Synthetic oligonucleotide
cuuuuccuagaguaaguu

SEQ ID NO: 2161 - RNA, 18 nt, Artificial Sequence
  Description of Artificial Sequence: Synthetic oligonucleotide
cauggcuuuuccuagagu

SEQ ID NO: 2162 - RNA, 18 nt, Artificial Sequence
  Description of Artificial Sequence: Synthetic oligonucleotide
agagacauggcuuuuccu

SEQ ID NO: 2163 - RNA, 18 nt, Artificial Sequence
  Description of Artificial Sequence: Synthetic oligonucleotide
gggagagagacauggcuu

SEQ ID NO: 2164 - RNA, 18 nt, Artificial Sequence
  Description of Artificial Sequence: Synthetic oligonucleotide
cacagguccccccacccu

SEQ ID NO: 2165 - RNA, 18 nt, Artificial Sequence
  Description of Artificial Sequence: Synthetic oligonucleotide
uccaacacaggucccccc

SEQ ID NO: 2166 - RNA, 18 nt, Artificial Sequence
  Description of Artificial Sequence: Synthetic oligonucleotide
ccuccuccaacacagguc

SEQ ID NO: 2167 - RNA, 18 nt, Artificial Sequence
  Description of Artificial Sequence: Synthetic oligonucleotide
acaccccuccuccaacac

SEQ ID NO: 2168 - RNA, 18 nt, Artificial Sequence
  Description of Artificial Sequence: Synthetic oligonucleotide
ccccaacaccccuccucc

SEQ ID NO: 2169 - RNA, 18 nt, Artificial Sequence
  Description of Artificial Sequence: Synthetic oligonucleotide
gggccccccaacaccccu

SEQ ID NO: 2170 - RNA, 18 nt, Artificial Sequence
  Description of Artificial Sequence: Synthetic oligonucleotide
gggacagagucauggaag

SEQ ID NO: 2171 - RNA, 18 nt, Artificial Sequence
  Description of Artificial Sequence: Synthetic oligonucleotide
guccuaccucccccaggg

SEQ ID NO: 2172 - RNA, 18 nt, Artificial Sequence
  Description of Artificial Sequence: Synthetic oligonucleotide
gcccuguccuaccucccc

SEQ ID NO: 2173 - RNA, 18 nt, Artificial Sequence
  Description of Artificial Sequence: Synthetic oligonucleotide
gcccagcccuguccuacc

SEQ ID NO: 2174 - RNA, 18 nt, Artificial Sequence
  Description of Artificial Sequence: Synthetic oligonucleotide
gggaagcccagcccuguc

SEQ ID NO: 2175 - RNA, 18 nt, Artificial Sequence
  Description of Artificial Sequence: Synthetic oligonucleotide
ugagagggaagcccagcc

SEQ ID NO: 2176 - RNA, 18 nt, Artificial Sequence
  Description of Artificial Sequence: Synthetic oligonucleotide
gaggaugagagggaagcc

SEQ ID NO: 2177 - RNA, 18 nt, Artificial Sequence
  Description of Artificial Sequence: Synthetic oligonucleotide
gggaggaugagagggaag

SEQ ID NO: 2178 - RNA, 18 nt, Artificial Sequence
  Description of Artificial Sequence: Synthetic oligonucleotide
ggaaggagauugggaggg

SEQ ID NO: 2179 - RNA, 18 nt, Artificial Sequence
  Description of Artificial Sequence: Synthetic oligonucleotide
gagguggaaggagauugg

SEQ ID NO: 2180 - RNA, 18 nt, Artificial Sequence
  Description of Artificial Sequence: Synthetic oligonucleotide
ggagggagguggaaggag

SEQ ID NO: 2181 - RNA, 18 nt, Artificial Sequence
  Description of Artificial Sequence: Synthetic oligonucleotide
gggagggagggaggugga

SEQ ID NO: 2182 - RNA, 18 nt, Artificial Sequence
  Description of Artificial Sequence: Synthetic oligonucleotide
cuggcgggagggagggag

SEQ ID NO: 2183 - RNA, 18 nt, Artificial Sequence
  Description of Artificial Sequence: Synthetic oligonucleotide
uggagcuggcgggaggga

SEQ ID NO: 2184 - RNA, 18 nt, Artificial Sequence
  Description of Artificial Sequence: Synthetic oligonucleotide
aaucguggagcuggcggg

SEQ ID NO: 2185 - RNA, 18 nt, Artificial Sequence
  Description of Artificial Sequence: Synthetic oligonucleotide
cgaaaaaucguggagcug

SEQ ID NO: 2186 - RNA, 18 nt, Artificial Sequence
  Description of Artificial Sequence: Synthetic oligonucleotide
aacaccgaaaaaucgugg

SEQ ID NO: 2187 - RNA, 18 nt, Artificial Sequence
  Description of Artificial Sequence: Synthetic oligonucleotide
agagaaacaccgaaaaau

SEQ ID NO: 2188 - RNA, 18 nt, Artificial Sequence
  Description of Artificial Sequence: Synthetic oligonucleotide
uguacagagaaacaccga

SEQ ID NO: 2189 - RNA, 18 nt, Artificial Sequence
  Description of Artificial Sequence: Synthetic oligonucleotide
aacuauguacagagaaac

SEQ ID NO: 2190 - RNA, 18 nt, Artificial Sequence
  Description of Artificial Sequence: Synthetic oligonucleotide
cagaaaacuauguacaga

SEQ ID NO: 2191 - RNA, 18 nt, Artificial Sequence
  Description of Artificial Sequence: Synthetic oligonucleotide
cccgccagaaaacuaugu

SEQ ID NO: 2192 - RNA, 18 nt, Artificial Sequence
  Description of Artificial Sequence: Synthetic oligonucleotide
ccuaucccgccagaaaac

SEQ ID NO: 2193 - RNA, 18 nt, Artificial Sequence
  Description of Artificial Sequence: Synthetic oligonucleotide
ccuccccuaucccgccag

SEQ ID NO: 2194 - RNA, 18 nt, Artificial Sequence
  Description of Artificial Sequence: Synthetic oligonucleotide
uccuaccuccccuauccc

SEQ ID NO: 2195 - RNA, 18 nt, Artificial Sequence
  Description of Artificial Sequence: Synthetic oligonucleotide
auccauccuaccuccccu

SEQ ID NO: 2196 - RNA, 18 nt, Artificial Sequence
  Description of Artificial Sequence: Synthetic oligonucleotide
accccauccauccuaccu

SEQ ID NO: 2197 - RNA, 18 nt, Artificial Sequence
  Description of Artificial Sequence: Synthetic oligonucleotide
cccaaaccccauccaucc

SEQ ID NO: 2198 - RNA, 18 nt, Artificial Sequence
  Description of Artificial Sequence: Synthetic oligonucleotide
cccaccccaaaccccauc

SEQ ID NO: 2199 - RNA, 18 nt, Artificial Sequence
  Description of Artificial Sequence: Synthetic oligonucleotide
gccuacccaccccaaacc

SEQ ID NO: 2200 - RNA, 18 nt, Artificial Sequence
  Description of Artificial Sequence: Synthetic oligonucleotide
ccauggccuacccacccc

SEQ ID NO: 2201 - RNA, 18 nt, Artificial Sequence
  Description of Artificial Sequence: Synthetic oligonucleotide
cccucccauggccuaccc

SEQ ID NO: 2202 - RNA, 18 nt, Artificial Sequence
  Description of Artificial Sequence: Synthetic oligonucleotide
uucuccccucccauggcc

SEQ ID NO: 2203 - RNA, 18 nt, Artificial Sequence
  Description of Artificial Sequence: Synthetic oligonucleotide
gggcuucuccccucccau

SEQ ID NO: 2204 - RNA, 18 nt, Artificial Sequence
  Description of Artificial Sequence: Synthetic oligonucleotide
agcagucagggaagaggg

SEQ ID NO: 2205 - RNA, 18 nt, Artificial Sequence
  Description of Artificial Sequence: Synthetic oligonucleotide
gggacagcagucagggaa

SEQ ID NO: 2206 - RNA, 18 nt, Artificial Sequence
  Description of Artificial Sequence: Synthetic oligonucleotide
gggcaaggcuggguaggg

SEQ ID NO: 2207 - RNA, 18 nt, Artificial Sequence
  Description of Artificial Sequence: Synthetic oligonucleotide
acgcaaaaggaugaaggg

SEQ ID NO: 2208 - RNA, 18 nt, Artificial Sequence
  Description of Artificial Sequence: Synthetic oligonucleotide
accaaacgcaaaaggaug

SEQ ID NO: 2209 - RNA, 18 nt, Artificial Sequence
  Description of Artificial Sequence: Synthetic oligonucleotide
ucaauaccaaacgcaaaa

SEQ ID NO: 2210 - RNA, 18 nt, Artificial Sequence
  Description of Artificial Sequence: Synthetic oligonucleotide
gagucucaauaccaaacg

SEQ ID NO: 2211 - RNA, 18 nt, Artificial Sequence
  Description of Artificial Sequence: Synthetic oligonucleotide
uaggagagucucaauacc

SEQ ID NO: 2212 - RNA, 18 nt, Artificial Sequence
  Description of Artificial Sequence: Synthetic oligonucleotide
gagucuaggagagucuca

SEQ ID NO: 2213 - RNA, 18 nt, Artificial Sequence
  Description of Artificial Sequence: Synthetic oligonucleotide
gaguagagucuaggagag

SEQ ID NO: 2214 - RNA, 18 nt, Artificial Sequence
  Description of Artificial Sequence: Synthetic oligonucleotide
aagaggaguagagucuag

SEQ ID NO: 2215 - RNA, 18 nt, Artificial Sequence
  Description of Artificial Sequence: Synthetic oligonucleotide
aaagaaagaggaguagag

SEQ ID NO: 2216 - RNA, 18 nt, Artificial Sequence
  Description of Artificial Sequence: Synthetic oligonucleotide
auacaaaagaaagaggag

SEQ ID NO: 2217 - RNA, 18 nt, Artificial Sequence
  Description of Artificial Sequence: Synthetic oligonucleotide
uguccauacaaaagaaag

SEQ ID NO: 2218 - RNA, 18 nt, Artificial Sequence
  Description of Artificial Sequence: Synthetic oligonucleotide
ggaacuguccauacaaaa

SEQ ID NO: 2219 - RNA, 18 nt, Artificial Sequence
  Description of Artificial Sequence: Synthetic oligonucleotide
gggaacuguccauacaaa

SEQ ID NO: 2220 - RNA, 18 nt, Artificial Sequence
  Description of Artificial Sequence: Synthetic oligonucleotide
cuggguguauguguaggg

SEQ ID NO: 2221 - RNA, 18 nt, Artificial Sequence
  Description of Artificial Sequence: Synthetic oligonucleotide
cccggcuggguguaugug

SEQ ID NO: 2222 - RNA, 18 nt, Artificial Sequence
  Description of Artificial Sequence: Synthetic oligonucleotide
uuggccccggcugggugu

SEQ ID NO: 2223 - RNA, 18 nt, Artificial Sequence
  Description of Artificial Sequence: Synthetic oligonucleotide
uaaauuuggccccggcug

SEQ ID NO: 2224 - RNA, 18 nt, Artificial Sequence
  Description of Artificial Sequence: Synthetic oligonucleotide
aaguauaaauuuggcccc

SEQ ID NO: 2225 - RNA, 18 nt, Artificial Sequence
  Description of Artificial Sequence: Synthetic oligonucleotide
uauauaaguauaaauuug

SEQ ID NO: 2226 - RNA, 18 nt, Artificial Sequence
  Description of Artificial Sequence: Synthetic oligonucleotide
acuuuuauauaaguauaa

SEQ ID NO: 2227 - RNA, 18 nt, Artificial Sequence
  Description of Artificial Sequence: Synthetic oligonucleotide
uuacaacuuuuauauaag

SEQ ID NO: 2228 - RNA, 18 nt, Artificial Sequence
  Description of Artificial Sequence: Synthetic oligonucleotide
cauauuuacaacuuuuau

SEQ ID NO: 2229 - RNA, 18 nt, Artificial Sequence
  Description of Artificial Sequence: Synthetic oligonucleotide
uuucacauauuuacaacu

SEQ ID NO: 2230 - RNA, 18 nt, Artificial Sequence
  Description of Artificial Sequence: Synthetic oligonucleotide
uaaaauuucacauauuua

SEQ ID NO: 2231 - RNA, 18 nt, Artificial Sequence
  Description of Artificial Sequence: Synthetic oligonucleotide
agggauaaaauuucacau

SEQ ID NO: 2232 - RNA, 18 nt, Artificial Sequence
  Description of Artificial Sequence: Synthetic oligonucleotide
ggcacagggauaaaauuu

SEQ ID NO: 2233 - RNA, 18 nt, Artificial Sequence
  Description of Artificial Sequence: Synthetic oligonucleotide
gaaagggcacagggauaa

SEQ ID NO: 2234 - RNA, 18 nt, Artificial Sequence
  Description of Artificial Sequence: Synthetic oligonucleotide
gggaaagggcacagggau

SEQ ID NO: 2235 - RNA, 18 nt, Artificial Sequence
  Description of Artificial Sequence: Synthetic oligonucleotide
gguagggccugagguggg

SEQ ID NO: 2236 - RNA, 18 nt, Artificial Sequence
  Description of Artificial Sequence: Synthetic oligonucleotide
ggguagggccugaggugg

SEQ ID NO: 2237 - RNA, 18 nt, Artificial Sequence
  Description of Artificial Sequence: Synthetic oligonucleotide
gagagaaggaagguuggg

SEQ ID NO: 2238 - RNA, 18 nt, Artificial Sequence
  Description of Artificial Sequence: Synthetic oligonucleotide
aagaagagagaaggaagg

SEQ ID NO: 2239 - RNA, 18 nt, Artificial Sequence
  Description of Artificial Sequence: Synthetic oligonucleotide
agccaaagaagagagaag

SEQ ID NO: 2240 - RNA, 18 nt, Artificial Sequence
  Description of Artificial Sequence: Synthetic oligonucleotide
acaacagccaaagaagag

SEQ ID NO: 2241 - RNA, 18 nt, Artificial Sequence
  Description of Artificial Sequence: Synthetic oligonucleotide
uaauuacaacagccaaag

SEQ ID NO: 2242 - RNA, 18 nt, Artificial Sequence
  Description of Artificial Sequence: Synthetic oligonucleotide
ccagauaauuacaacagc

SEQ ID NO: 2243 - RNA, 18 nt, Artificial Sequence
  Description of Artificial Sequence: Synthetic oligonucleotide
aaaccccagauaauuaca

SEQ ID NO: 2244 - RNA, 18 nt, Artificial Sequence
  Description of Artificial Sequence: Synthetic oligonucleotide
aguacaaaccccagauaa

SEQ ID NO: 2245 - RNA, 18 nt, Artificial Sequence
  Description of Artificial Sequence: Synthetic oligonucleotide
uguacaguacaaacccca

SEQ ID NO: 2246 - RNA, 18 nt, Artificial Sequence
  Description of Artificial Sequence: Synthetic oligonucleotide
ggauauguacaguacaaa

SEQ ID NO: 2247 - RNA, 18 nt, Artificial Sequence
  Description of Artificial Sequence: Synthetic oligonucleotide
accccggauauguacagu

SEQ ID NO: 2248 - RNA, 18 nt, Artificial Sequence
  Description of Artificial Sequence: Synthetic oligonucleotide
cacacaccccggauaugu

SEQ ID NO: 2249 - RNA, 18 nt, Artificial Sequence
  Description of Artificial Sequence: Synthetic oligonucleotide
acacacacacaccccgga

SEQ ID NO: 2250 - RNA, 18 nt, Artificial Sequence
  Description of Artificial Sequence: Synthetic oligonucleotide
agcccacacacacacacc

SEQ ID NO: 2251 - RNA, 18 nt, Artificial Sequence
  Description of Artificial Sequence: Synthetic oligonucleotide
cccccagcccacacacac

SEQ ID NO: 2252 - RNA, 18 nt, Artificial Sequence
  Description of Artificial Sequence: Synthetic oligonucleotide
gguugcccccagcccaca

SEQ ID NO: 2253 - RNA, 18 nt, Artificial Sequence
  Description of Artificial Sequence: Synthetic oligonucleotide
agaaggguugcccccagc

SEQ ID NO: 2254 - RNA, 18 nt, Artificial Sequence
  Description of Artificial Sequence: Synthetic oligonucleotide
uguacagaaggguugccc

SEQ ID NO: 2255 - RNA, 18 nt, Artificial Sequence
  Description of Artificial Sequence: Synthetic oligonucleotide
agcucuguacagaagggu

SEQ ID NO: 2256 - RNA, 18 nt, Artificial Sequence
  Description of Artificial Sequence: Synthetic oligonucleotide
caggaagcucuguacaga

SEQ ID NO: 2257 - RNA, 18 nt, Artificial Sequence
  Description of Artificial Sequence: Synthetic oligonucleotide
gggccaggaagcucugua

SEQ ID NO: 2258 - RNA, 18 nt, Artificial Sequence
  Description of Artificial Sequence: Synthetic oligonucleotide
cuugaggugguggguggg

SEQ ID NO: 2259 - RNA, 18 nt, Artificial Sequence
  Description of Artificial Sequence: Synthetic oligonucleotide
cuacccuugagguggugg

SEQ ID NO: 2260 - RNA, 18 nt, Artificial Sequence
  Description of Artificial Sequence: Synthetic oligonucleotide
acucccuacccuugaggu

SEQ ID NO: 2261 - RNA, 18 nt, Artificial Sequence
  Description of Artificial Sequence: Synthetic oligonucleotide
gagcaacucccuacccuu

SEQ ID NO: 2262 - RNA, 18 nt, Artificial Sequence
  Description of Artificial Sequence: Synthetic oligonucleotide
aggaagagcaacucccua

SEQ ID NO: 2263 - RNA, 18 nt, Artificial Sequence
  Description of Artificial Sequence: Synthetic oligonucleotide
cagguaggaagagcaacu

SEQ ID NO: 2264 - RNA, 18 nt, Artificial Sequence
  Description of Artificial Sequence: Synthetic oligonucleotide
uaaaacagguaggaagag

SEQ ID NO: 2265 - RNA, 18 nt, Artificial Sequence
  Description of Artificial Sequence: Synthetic oligonucleotide
caaaauaaaacagguagg

SEQ ID NO: 2266 - RNA, 18 nt, Artificial Sequence
  Description of Artificial Sequence: Synthetic oligonucleotide
gaaaacaaaauaaaacag

SEQ ID NO: 2267 - RNA, 18 nt, Artificial Sequence
  Description of Artificial Sequence: Synthetic oligonucleotide
aacgagaaaacaaaauaa

SEQ ID NO: 2268 - RNA, 18 nt, Artificial Sequence
  Description of Artificial Sequence: Synthetic oligonucleotide
gggagaacgagaaaacaa

SEQ ID NO: 2269 - RNA, 18 nt, Artificial Sequence
  Description of Artificial Sequence: Synthetic oligonucleotide
gggagggagaacgagaaa

SEQ ID NO: 2270 - RNA, 18 nt, Artificial Sequence
  Description of Artificial Sequence: Synthetic oligonucleotide
gauaaggcugggaguggg

SEQ ID NO: 2271 - RNA, 18 nt, Artificial Sequence
  Description of Artificial Sequence: Synthetic oligonucleotide
ggauagauaaggcuggga

SEQ ID NO: 2272 - RNA, 18 nt, Artificial Sequence
  Description of Artificial Sequence: Synthetic oligonucleotide
gggauagauaaggcuggg

SEQ ID NO: 2273 - RNA, 18 nt, Artificial Sequence
  Description of Artificial Sequence: Synthetic oligonucleotide
ugggaguggagaaaaggg

SEQ ID NO: 2274 - RNA, 18 nt, Artificial Sequence
  Description of Artificial Sequence: Synthetic oligonucleotide
gggcugggaguggagaaa

SEQ ID NO: 2275 - RNA, 18 nt, Artificial Sequence
  Description of Artificial Sequence: Synthetic oligonucleotide
agaaaaaaaggaaauggg

SEQ ID NO: 2276 - RNA, 18 nt, Artificial Sequence
  Description of Artificial Sequence: Synthetic oligonucleotide
acuccagaaaaaaaggaa

SEQ ID NO: 2277 - RNA, 18 nt, Artificial Sequence
  Description of Artificial Sequence: Synthetic oligonucleotide
cacacacuccagaaaaaa

SEQ ID NO: 2278 - RNA, 18 nt, Artificial Sequence
  Description of Artificial Sequence: Synthetic oligonucleotide
uucaccacacacuccaga

SEQ ID NO: 2279 - RNA, 18 nt, Artificial Sequence
  Description of Artificial Sequence: Synthetic oligonucleotide
ucuguuucaccacacacu

SEQ ID NO: 2280 - RNA, 18 nt, Artificial Sequence
  Description of Artificial Sequence: Synthetic oligonucleotide
uuuuuucuguuucaccac

SEQ ID NO: 2281 - RNA, 18 nt, Artificial Sequence
  Description of Artificial Sequence: Synthetic oligonucleotide
cauguuuuuuucuguuuc

SEQ ID NO: 2282 - RNA, 18 nt, Artificial Sequence
  Description of Artificial Sequence: Synthetic oligonucleotide
uuaaacauguuuuuuucu

SEQ ID NO: 2283 - RNA, 18 nt, Artificial Sequence
  Description of Artificial Sequence: Synthetic oligonucleotide
guuuauuaaacauguuuu

SEQ ID NO: 2284 - RNA, 18 nt, Artificial Sequence
  Description of Artificial Sequence: Synthetic oligonucleotide
ucuccguuuauuaaacau

SEQ ID NO: 2285 - RNA, 18 nt, Artificial Sequence
  Description of Artificial Sequence: Synthetic oligonucleotide
aacaaucuccguuuauua

SEQ ID NO: 2286 - RNA, 18 nt, Artificial Sequence
  Description of Artificial Sequence: Synthetic oligonucleotide
aaaagaacaaucuccguu

SEQ ID NO: 2287 - RNA, 18 nt, Artificial Sequence
  Description of Artificial Sequence: Synthetic oligonucleotide
gcgagccauguccauaga

SEQ ID NO: 2288 - RNA, 18 nt, Artificial Sequence
  Description of Artificial Sequence: Synthetic oligonucleotide
gggaggcgagccaugucc

SEQ ID NO: 2289 - RNA, 18 nt, Artificial Sequence
  Description of Artificial Sequence: Synthetic oligonucleotide
ggcuuuuccuugguuggg

SEQ ID NO: 2290 - RNA, 18 nt, Artificial Sequence
  Description of Artificial Sequence: Synthetic oligonucleotide
ggguggcuuuuccuuggu

SEQ ID NO: 2291 - RNA, 18 nt, Artificial Sequence
  Description of Artificial Sequence: Synthetic oligonucleotide
ccaccaggcggugguggg

SEQ ID NO: 2292 - RNA, 18 nt, Artificial Sequence
  Description of Artificial Sequence: Synthetic oligonucleotide
accaccaccaggcggugg

SEQ ID NO: 2293 - RNA, 18 nt, Artificial Sequence
  Description of Artificial Sequence: Synthetic oligonucleotide
ucuuuaccaccaccaggc

SEQ ID NO: 2294 - RNA, 18 nt, Artificial Sequence
  Description of Artificial Sequence: Synthetic oligonucleotide
acaggucuuuaccaccac

SEQ ID NO: 2295 - RNA, 18 nt, Artificial Sequence
  Description of Artificial Sequence: Synthetic oligonucleotide
auagaacaggucuuuacc

SEQ ID NO: 2296 - RNA, 18 nt, Artificial Sequence
  Description of Artificial Sequence: Synthetic oligonucleotide
cuuacauagaacaggucu

SEQ ID NO: 2297 - RNA, 18 nt, Artificial Sequence
  Description of Artificial Sequence: Synthetic oligonucleotide
gacggcuuacauagaaca

SEQ ID NO: 2298 - RNA, 18 nt, Artificial Sequence
  Description of Artificial Sequence: Synthetic oligonucleotide
ggguggacggcuuacaua

SEQ ID NO: 2299 - RNA, 18 nt, Artificial Sequence
  Description of Artificial Sequence: Synthetic oligonucleotide
gugaggaacgggccaggg

SEQ ID NO: 2300 - RNA, 18 nt, Artificial Sequence
  Description of Artificial Sequence: Synthetic oligonucleotide
ggugaggaacgggccagg

SEQ ID NO: 2301 - RNA, 18 nt, Artificial Sequence
  Description of Artificial Sequence: Synthetic oligonucleotide
augcuggugaggaacggg

SEQ ID NO: 2302 - RNA, 18 nt, Artificial Sequence
  Description of Artificial Sequence: Synthetic oligonucleotide
gcaguaugcuggugagga

SEQ ID NO: 2303 - RNA, 18 nt, Artificial Sequence
  Description of Artificial Sequence: Synthetic oligonucleotide
cucgugcaguaugcuggu

SEQ ID NO: 2304 - RNA, 18 nt, Artificial Sequence
  Description of Artificial Sequence: Synthetic oligonucleotide
agcugcucgugcaguaug

SEQ ID NO: 2305 - RNA, 18 nt, Artificial Sequence
  Description of Artificial Sequence: Synthetic oligonucleotide
guccgagcugcucgugca

SEQ ID NO: 2306 - RNA, 18 nt, Artificial Sequence
  Description of Artificial Sequence: Synthetic oligonucleotide
gugauguccgagcugcuc

SEQ ID NO: 2307 - RNA, 18 nt, Artificial Sequence
  Description of Artificial Sequence: Synthetic oligonucleotide
gcucugugauguccgagc

SEQ ID NO: 2308 - RNA, 18 nt, Artificial Sequence
  Description of Artificial Sequence: Synthetic oligonucleotide
cucuggcucugugauguc

SEQ ID NO: 2309 - RNA, 18 nt, Artificial Sequence
  Description of Artificial Sequence: Synthetic oligonucleotide
uucugcucuggcucugug

SEQ ID NO: 2310 - RNA, 18 nt, Artificial Sequence
  Description of Artificial Sequence: Synthetic oligonucleotide
gcaucuucugcucuggcu

SEQ ID NO: 2311 - RNA, 18 nt, Artificial Sequence
  Description of Artificial Sequence: Synthetic oligonucleotide
acucagcaucuucugcuc

SEQ ID NO: 2312 - RNA, 18 nt, Artificial Sequence
  Description of Artificial Sequence: Synthetic oligonucleotide
uugacacucagcaucuuc

SEQ ID NO: 2313 - RNA, 18 nt, Artificial Sequence
  Description of Artificial Sequence: Synthetic oligonucleotide
ucuuguugacacucagca

SEQ ID NO: 2314 - RNA, 18 nt, Artificial Sequence
  Description of Artificial Sequence: Synthetic oligonucleotide
cacacucuuguugacacu

SEQ ID NO: 2315 - RNA, 18 nt, Artificial Sequence
  Description of Artificial Sequence: Synthetic oligonucleotide
auggacacacucuuguug

SEQ ID NO: 2316 - RNA, 18 nt, Artificial Sequence
  Description of Artificial Sequence: Synthetic oligonucleotide
ccagcauggacacacucu

SEQ ID NO: 2317 - RNA, 18 nt, Artificial Sequence
  Description of Artificial Sequence: Synthetic oligonucleotide
uaaguccagcauggacac

SEQ ID NO: 2318 - RNA, 18 nt, Artificial Sequence
  Description of Artificial Sequence: Synthetic oligonucleotide
cccuguaaguccagcaug

SEQ ID NO: 2319 - RNA, 18 nt, Artificial Sequence
  Description of Artificial Sequence: Synthetic oligonucleotide
caucacccuguaagucca

SEQ ID NO: 2320 - RNA, 18 nt, Artificial Sequence
  Description of Artificial Sequence: Synthetic oligonucleotide
aggcccaucacccuguaa

SEQ ID NO: 2321 - RNA, 18 nt, Artificial Sequence
  Description of Artificial Sequence: Synthetic oligonucleotide
ccaccaggcccaucaccc

SEQ ID NO: 2322 - RNA, 18 nt, Artificial Sequence
  Description of Artificial Sequence: Synthetic oligonucleotide
ggcggccaccaggcccau

SEQ ID NO: 2323 - RNA, 18 nt, Artificial Sequence
  Description of Artificial Sequence: Synthetic oligonucleotide
guugaggcggccaccagg

SEQ ID NO: 2324 - RNA, 18 nt, Artificial Sequence
  Description of Artificial Sequence: Synthetic oligonucleotide
cugcuguugaggcggcca

SEQ ID NO: 2325 - RNA, 18 nt, Artificial Sequence
  Description of Artificial Sequence: Synthetic oligonucleotide
cacugcugcuguugaggc

SEQ ID NO: 2326 - RNA, 18 nt, Artificial Sequence
  Description of Artificial Sequence: Synthetic oligonucleotide
cgaaacacugcugcuguu

SEQ ID NO: 2327 - RNA, 18 nt, Artificial Sequence
  Description of Artificial Sequence: Synthetic oligonucleotide
agguucgaaacacugcug

SEQ ID NO: 2328 - RNA, 18 nt, Artificial Sequence
  Description of Artificial Sequence: Synthetic oligonucleotide
ccgccagguucgaaacac

SEQ ID NO: 2329 - RNA, 18 nt, Artificial Sequence
  Description of Artificial Sequence: Synthetic oligonucleotide
uacggccgccagguucga

SEQ ID NO: 2330 - RNA, 18 nt, Artificial Sequence
  Description of Artificial Sequence: Synthetic oligonucleotide
uccccuacggccgccagg

SEQ ID NO: 2331 - RNA, 18 nt, Artificial Sequence
  Description of Artificial Sequence: Synthetic oligonucleotide
gcagguccccuacggccg

SEQ ID NO: 2332 - RNA, 18 nt, Artificial Sequence
  Description of Artificial Sequence: Synthetic oligonucleotide
gugcagcagguccccuac

SEQ ID NO: 2333 - RNA, 18 nt, Artificial Sequence
  Description of Artificial Sequence: Synthetic oligonucleotide
cuugagugcagcaggucc

SEQ ID NO: 2334 - RNA, 18 nt, Artificial Sequence
  Description of Artificial Sequence: Synthetic oligonucleotide
ccuggcuugagugcagca

SEQ ID NO: 2335 - RNA, 18 nt, Artificial Sequence
  Description of Artificial Sequence: Synthetic oligonucleotide
cgaggccuggcuugagug

SEQ ID NO: 2336 - RNA, 18 nt, Artificial Sequence
  Description of Artificial Sequence: Synthetic oligonucleotide
gucagcgaggccuggcuu

SEQ ID NO: 2337 - RNA, 18 nt, Artificial Sequence
  Description of Artificial Sequence: Synthetic oligonucleotide
cugcugucagcgaggccu

SEQ ID NO: 2338 - RNA, 18 nt, Artificial Sequence
  Description of Artificial Sequence: Synthetic oligonucleotide
caaggcugcugucagcga

SEQ ID NO: 2339 - RNA, 18 nt, Artificial Sequence
  Description of Artificial Sequence: Synthetic oligonucleotide
agccccaaggcugcuguc

SEQ ID NO: 2340 - RNA, 18 nt, Artificial Sequence
  Description of Artificial Sequence: Synthetic oligonucleotide
gccguagccccaaggcug

SEQ ID NO: 2341 - RNA, 18 nt, Artificial Sequence
  Description of Artificial Sequence: Synthetic oligonucleotide
cgcaggccguagccccaa

SEQ ID NO: 2342 - RNA, 18 nt, Artificial Sequence
  Description of Artificial Sequence: Synthetic oligonucleotide
gcaggcgcaggccguagc

SEQ ID NO: 2343 - RNA, 18 nt, Artificial Sequence
  Description of Artificial Sequence: Synthetic oligonucleotide
guccggcaggcgcaggcc

SEQ ID NO: 2344 - RNA, 18 nt, Artificial Sequence
  Description of Artificial Sequence: Synthetic oligonucleotide
gaggcguccggcaggcgc

SEQ ID NO: 2345 - RNA, 18 nt, Artificial Sequence
  Description of Artificial Sequence: Synthetic oligonucleotide
ugggagaggcguccggca

SEQ ID NO: 2346 - RNA, 18 nt, Artificial Sequence
  Description of Artificial Sequence: Synthetic oligonucleotide
uccccugggagaggcguc

SEQ ID NO: 2347 - RNA, 18 nt, Artificial Sequence
  Description of Artificial Sequence: Synthetic oligonucleotide
gccacuccccugggagag

SEQ ID NO: 2348 - RNA, 18 nt, Artificial Sequence
  Description of Artificial Sequence: Synthetic oligonucleotide
gaugagccacuccccugg

SEQ ID NO: 2349 - RNA, 18 nt, Artificial Sequence
  Description of Artificial Sequence: Synthetic oligonucleotide
ugauggaugagccacucc

SEQ ID NO: 2350 - RNA, 18 nt, Artificial Sequence
  Description of Artificial Sequence: Synthetic oligonucleotide
cgccgugauggaugagcc

SEQ ID NO: 2351 - RNA, 18 nt, Artificial Sequence
  Description of Artificial Sequence: Synthetic oligonucleotide
ccagccgccgugauggau

SEQ ID NO: 2352 - RNA, 18 nt, Artificial Sequence
  Description of Artificial Sequence: Synthetic oligonucleotide
gcaugccagccgccguga

SEQ ID NO: 2353 - RNA, 18 nt, Artificial Sequence
  Description of Artificial Sequence: Synthetic oligonucleotide
gaggcgcaugccagccgc

SEQ ID NO: 2354 - RNA, 18 nt, Artificial Sequence
  Description of Artificial Sequence: Synthetic oligonucleotide
uggcugaggcgcaugcca

SEQ ID NO: 2355 - RNA, 18 nt, Artificial Sequence
  Description of Artificial Sequence: Synthetic oligonucleotide
ccaucuggcugaggcgca

SEQ ID NO: 2356 - RNA, 18 nt, Artificial Sequence
  Description of Artificial Sequence: Synthetic oligonucleotide
gacacccaucuggcugag

SEQ ID NO: 2357 - RNA, 18 nt, Artificial Sequence
  Description of Artificial Sequence: Synthetic oligonucleotide
guggugacacccaucugg

SEQ ID NO: 2358 - RNA, 18 nt, Artificial Sequence
  Description of Artificial Sequence: Synthetic oligonucleotide
cgucuguggugacaccca

SEQ ID NO: 2359 - RNA, 18 nt, Artificial Sequence
  Description of Artificial Sequence: Synthetic oligonucleotide
gacaccgucuguggugac

SEQ ID NO: 2360 - RNA, 18 nt, Artificial Sequence
  Description of Artificial Sequence: Synthetic oligonucleotide
gcagggacaccgucugug

SEQ ID NO: 2361 - RNA, 18 nt, Artificial Sequence
  Description of Artificial Sequence: Synthetic oligonucleotide
gcugggcagggacaccgu

SEQ ID NO: 2362 - RNA, 18 nt, Artificial Sequence
  Description of Artificial Sequence: Synthetic oligonucleotide
caguugcugggcagggac

SEQ ID NO: 2363 - RNA, 18 nt, Artificial Sequence
  Description of Artificial Sequence: Synthetic oligonucleotide
auucgcaguugcugggca

SEQ ID NO: 2364 - RNA, 18 nt, Artificial Sequence
  Description of Artificial Sequence: Synthetic oligonucleotide
gguucuggaaggagaggg

SEQ ID NO: 2365 - RNA, 18 nt, Artificial Sequence
  Description of Artificial Sequence: Synthetic oligonucleotide
gagaggguucuggaagga

SEQ ID NO: 2366 - RNA, 18 nt, Artificial Sequence
  Description of Artificial Sequence: Synthetic oligonucleotide
uggaagagaggguucugg

SEQ ID NO: 2367 - RNA, 18 nt, Artificial Sequence
  Description of Artificial Sequence: Synthetic oligonucleotide
ccauguggaagagagggu

SEQ ID NO: 2368 - RNA, 18 nt, Artificial Sequence
  Description of Artificial Sequence: Synthetic oligonucleotide
agcagccauguggaagag

SEQ ID NO: 2369 - RNA, 18 nt, Artificial Sequence
  Description of Artificial Sequence: Synthetic oligonucleotide
ccaucagcagccaugugg

SEQ ID NO: 2370 - RNA, 18 nt, Artificial Sequence
  Description of Artificial Sequence: Synthetic oligonucleotide
cuggcccaucagcagcca

SEQ ID NO: 2371 - RNA, 18 nt, Artificial Sequence
  Description of Artificial Sequence: Synthetic oligonucleotide
gggaccuggcccaucagc

SEQ ID NO: 2372 - RNA, 18 nt, Artificial Sequence
  Description of Artificial Sequence: Synthetic oligonucleotide
ccuccauggccgccuggg

SEQ ID NO: 2373 - RNA, 18 nt, Artificial Sequence
  Description of Artificial Sequence: Synthetic oligonucleotide
cccccuccauggccgccu

SEQ ID NO: 2374 - RNA, 18 nt, Artificial Sequence
  Description of Artificial Sequence: Synthetic oligonucleotide
caccgcccccuccauggc

SEQ ID NO: 2375 - RNA, 18 nt, Artificial Sequence
  Description of Artificial Sequence: Synthetic oligonucleotide
auggccaccgcccccucc

SEQ ID NO: 2376 - RNA, 18 nt, Artificial Sequence
  Description of Artificial Sequence: Synthetic oligonucleotide
gggccauggccaccgccc

SEQ ID NO: 2377 - RNA, 18 nt, Artificial Sequence
  Description of Artificial Sequence: Synthetic oligonucleotide
aaggugggccauggccac

SEQ ID NO: 2378 - RNA, 18 nt, Artificial Sequence
  Description of Artificial Sequence: Synthetic oligonucleotide
ggaggaaggugggccaug

SEQ ID NO: 2379 - RNA, 18 nt, Artificial Sequence
  Description of Artificial Sequence: Synthetic oligonucleotide
ugaugggaggaagguggg

SEQ ID NO: 2380 - RNA, 18 nt, Artificial Sequence
  Description of Artificial Sequence: Synthetic oligonucleotide
gguggugaugggaggaag

SEQ ID NO: 2381 - RNA, 18 nt, Artificial Sequence
  Description of Artificial Sequence: Synthetic oligonucleotide
guggugguggugauggga

SEQ ID NO: 2382 - RNA, 18 nt, Artificial Sequence
  Description of Artificial Sequence: Synthetic oligonucleotide
ugguggugguggugguga

SEQ ID NO: 2383 - RNA, 18 nt, Artificial Sequence
  Description of Artificial Sequence: Synthetic oligonucleotide
ggugaugguggugguggu

SEQ ID NO: 2384 - RNA, 18 nt, Artificial Sequence
  Description of Artificial Sequence: Synthetic oligonucleotide
gugguggugaugguggug

SEQ ID NO: 2385 - RNA, 18 nt, Artificial Sequence
  Description of Artificial Sequence: Synthetic oligonucleotide
ccucggugguggugaugg

SEQ ID NO: 2386 - RNA, 18 nt, Artificial Sequence
  Description of Artificial Sequence: Synthetic oligonucleotide
cuccaccucggugguggu

SEQ ID NO: 2387 - RNA, 18 nt, Artificial Sequence
  Description of Artificial Sequence: Synthetic oligonucleotide
gggcucuccaccucggug

SEQ ID NO: 2388 - RNA, 18 nt, Artificial Sequence
  Description of Artificial Sequence: Synthetic oligonucleotide
gcaaagguguccccaggg

SEQ ID NO: 2389 - RNA, 18 nt, Artificial Sequence
  Description of Artificial Sequence: Synthetic oligonucleotide
cuauagccauggaauggg

SEQ ID NO: 2390 - RNA, 18 nt, Artificial Sequence
  Description of Artificial Sequence: Synthetic oligonucleotide
ucuugcuauagccaugga

SEQ ID NO: 2391 - RNA, 18 nt, Artificial Sequence
  Description of Artificial Sequence: Synthetic oligonucleotide
cucacucuugcuauagcc

SEQ ID NO: 2392 - RNA, 18 nt, Artificial Sequence
  Description of Artificial Sequence: Synthetic oligonucleotide
agguccucacucuugcua

SEQ ID NO: 2393 - RNA, 18 nt, Artificial Sequence
  Description of Artificial Sequence: Synthetic oligonucleotide
aagagagguccucacucu

SEQ ID NO: 2394 - RNA, 18 nt, Artificial Sequence
  Description of Artificial Sequence: Synthetic oligonucleotide
cccggaagagagguccuc

SEQ ID NO: 2395 - RNA, 18 nt, Artificial Sequence
  Description of Artificial Sequence: Synthetic oligonucleotide
gggaccccggaagagagg

SEQ ID NO: 2396 - RNA, 18 nt, Artificial Sequence
  Description of Artificial Sequence: Synthetic oligonucleotide
aggauggaggcagcaggg

SEQ ID NO: 2397 - RNA, 18 nt, Artificial Sequence
  Description of Artificial Sequence: Synthetic oligonucleotide
ugaaggauggaggcagca

SEQ ID NO: 2398 - RNA, 18 nt, Artificial Sequence
  Description of Artificial Sequence: Synthetic oligonucleotide
ggcuaugaaggauggagg

SEQ ID NO: 2399 - RNA, 18 nt, Artificial Sequence
  Description of Artificial Sequence: Synthetic oligonucleotide
gcuguggcuaugaaggau

SEQ ID NO: 2400 - RNA, 18 nt, Artificial Sequence
  Description of Artificial Sequence: Synthetic oligonucleotide
cuguagcuguggcuauga

SEQ ID NO: 2401 - RNA, 18 nt, Artificial Sequence
  Description of Artificial Sequence: Synthetic oligonucleotide
caucacuguagcuguggc

SEQ ID NO: 2402 - RNA, 18 nt, Artificial Sequence
  Description of Artificial Sequence: Synthetic oligonucleotide
aaacucaucacuguagcu

SEQ ID NO: 2403 - RNA, 18 nt, Artificial Sequence
  Description of Artificial Sequence: Synthetic oligonucleotide
gguccaaacucaucacug

SEQ ID NO: 2404 - RNA, 18 nt, Artificial Sequence
  Description of Artificial Sequence: Synthetic oligonucleotide
cagaggguccaaacucau

SEQ ID NO: 2405 - RNA, 18 nt, Artificial Sequence
  Description of Artificial Sequence: Synthetic oligonucleotide
agugccagaggguccaaa

SEQ ID NO: 2406 - RNA, 18 nt, Artificial Sequence
  Description of Artificial Sequence: Synthetic oligonucleotide
aagucagugccagagggu

SEQ ID NO: 2407 - RNA, 18 nt, Artificial Sequence
  Description of Artificial Sequence: Synthetic oligonucleotide
gggugaagucagugccag

SEQ ID NO: 2408 - RNA, 18 nt, Artificial Sequence
  Description of Artificial Sequence: Synthetic oligonucleotide
ccgacgggugaagucagu

SEQ ID NO: 2409 - RNA, 18 nt, Artificial Sequence
  Description of Artificial Sequence: Synthetic oligonucleotide
agcugccgacgggugaag

SEQ ID NO: 2410 - RNA, 18 nt, Artificial Sequence
  Description of Artificial Sequence: Synthetic oligonucleotide
gugaaagcugccgacggg

SEQ ID NO: 2411 - RNA, 18 nt, Artificial Sequence
  Description of Artificial Sequence: Synthetic oligonucleotide
cuggagugaaagcugccg

SEQ ID NO: 2412 - RNA, 18 nt, Artificial Sequence
  Description of Artificial Sequence: Synthetic oligonucleotide
uuguccuggagugaaagc

SEQ ID NO: 2413 - RNA, 18 nt, Artificial Sequence
  Description of Artificial Sequence: Synthetic oligonucleotide
gcagguuguccuggagug

SEQ ID NO: 2414 - RNA, 18 nt, Artificial Sequence
  Description of Artificial Sequence: Synthetic oligonucleotide
gugcugcagguuguccug

SEQ ID NO: 2415 - RNA, 18 nt, Artificial Sequence
  Description of Artificial Sequence: Synthetic oligonucleotide
agcaugugcugcagguug

SEQ ID NO: 2416 - RNA, 18 nt, Artificial Sequence
  Description of Artificial Sequence: Synthetic oligonucleotide
gggacagcaugugcugca

SEQ ID NO: 2417 - RNA, 18 nt, Artificial Sequence
  Description of Artificial Sequence: Synthetic oligonucleotide
gaccaauggugaucuggg

SEQ ID NO: 2418 - RNA, 18 nt, Artificial Sequence
  Description of Artificial Sequence: Synthetic oligonucleotide
gggaccaauggugaucug

SEQ ID NO: 2419 - RNA, 18 nt, Artificial Sequence
  Description of Artificial Sequence: Synthetic oligonucleotide
accuccaggcccugaggg

SEQ ID NO: 2420 - RNA, 18 nt, Artificial Sequence
  Description of Artificial Sequence: Synthetic oligonucleotide
cucccaccuccaggcccu

SEQ ID NO: 2421 - RNA, 18 nt, Artificial Sequence
  Description of Artificial Sequence: Synthetic oligonucleotide
caccgcucccaccuccag

SEQ ID NO: 2422 - RNA, 18 nt, Artificial Sequence
  Description of Artificial Sequence: Synthetic oligonucleotide
gcccccaccgcucccacc

SEQ ID NO: 2423 - RNA, 18 nt, Artificial Sequence
  Description of Artificial Sequence: Synthetic oligonucleotide
ccgcugcccccaccgcuc

SEQ ID NO: 2424 - RNA, 18 nt, Artificial Sequence
  Description of Artificial Sequence: Synthetic oligonucleotide
ccccaccgcugcccccac

SEQ ID NO: 2425 - RNA, 18 nt, Artificial Sequence
  Description of Artificial Sequence: Synthetic oligonucleotide
gccacccccaccgcugcc

SEQ ID NO: 2426 - RNA, 18 nt, Artificial Sequence
  Description of Artificial Sequence: Synthetic oligonucleotide
cccccgccacccccaccg

SEQ ID NO: 2427 - RNA, 18 nt, Artificial Sequence
  Description of Artificial Sequence: Synthetic oligonucleotide
gcuggcccccgccacccc

SEQ ID NO: 2428 - RNA, 18 nt, Artificial Sequence
  Description of Artificial Sequence: Synthetic oligonucleotide
aggcggcuggcccccgcc

SEQ ID NO: 2429 - RNA, 18 nt, Artificial Sequence
  Description of Artificial Sequence: Synthetic oligonucleotide
aauggaggcggcuggccc

SEQ ID NO: 2430 - RNA, 18 nt, Artificial Sequence
  Description of Artificial Sequence: Synthetic oligonucleotide
ucugcaauggaggcggcu

SEQ ID NO: 2431 - RNA, 18 nt, Artificial Sequence
  Description of Artificial Sequence: Synthetic oligonucleotide
gccccucugcaauggagg

SEQ ID NO: 2432 - RNA, 18 nt, Artificial Sequence
  Description of Artificial Sequence: Synthetic oligonucleotide
gacuugccccucugcaau

SEQ ID NO: 2433 - RNA, 18 nt, Artificial Sequence
  Description of Artificial Sequence: Synthetic oligonucleotide
gcugagacuugccccucu

SEQ ID NO: 2434 - RNA, 18 nt, Artificial Sequence
  Description of Artificial Sequence: Synthetic oligonucleotide
caacugcugagacuugcc

SEQ ID NO: 2435 - RNA, 18 nt, Artificial Sequence
  Description of Artificial Sequence: Synthetic oligonucleotide
acugucaacugcugagac

SEQ ID NO: 2436 - RNA, 18 nt, Artificial Sequence
  Description of Artificial Sequence: Synthetic oligonucleotide
cgcugacugucaacugcu

SEQ ID NO: 2437 - RNA, 18 nt, Artificial Sequence
  Description of Artificial Sequence: Synthetic oligonucleotide
ggcugcgcugacugucaa

SEQ ID NO: 2438 - RNA, 18 nt, Artificial Sequence
  Description of Artificial Sequence: Synthetic oligonucleotide
uucugggcugcgcugacu

SEQ ID NO: 2439 - RNA, 18 nt, Artificial Sequence
  Description of Artificial Sequence: Synthetic oligonucleotide
ucccgcuggauggccggg

SEQ ID NO: 2440 - RNA, 18 nt, Artificial Sequence
  Description of Artificial Sequence: Synthetic oligonucleotide
uagauucccgcuggaugg

SEQ ID NO: 2441 - RNA, 18 nt, Artificial Sequence
  Description of Artificial Sequence: Synthetic oligonucleotide
ugcaauagauucccgcug

SEQ ID NO: 2442 - RNA, 18 nt, Artificial Sequence
  Description of Artificial Sequence: Synthetic oligonucleotide
gggacugcaauagauucc

SEQ ID NO: 2443 - RNA, 18 nt, Artificial Sequence
  Description of Artificial Sequence: Synthetic oligonucleotide
ccauaacuuggcucuggg

SEQ ID NO: 2444 - RNA, 18 nt, Artificial Sequence
  Description of Artificial Sequence: Synthetic oligonucleotide
gggccauaacuuggcucu

SEQ ID NO: 2445 - RNA, 18 nt, Artificial Sequence
  Description of Artificial Sequence: Synthetic oligonucleotide
uugccguggacgggcggg

SEQ ID NO: 2446 - RNA, 18 nt, Artificial Sequence
  Description of Artificial Sequence: Synthetic oligonucleotide
uguugccguggacgggcg

SEQ ID NO: 2447 - RNA, 18 nt, Artificial Sequence
  Description of Artificial Sequence: Synthetic oligonucleotide
ggcucuguugccguggac

SEQ ID NO: 2448 - RNA, 18 nt, Artificial Sequence
  Description of Artificial Sequence: Synthetic oligonucleotide
gcugaggcucuguugccg

SEQ ID NO: 2449 - RNA, 18 nt, Artificial Sequence
  Description of Artificial Sequence: Synthetic oligonucleotide
uccuugcugaggcucugu

SEQ ID NO: 2450 - RNA, 18 nt, Artificial Sequence
  Description of Artificial Sequence: Synthetic oligonucleotide
ugcccuccuugcugaggc

SEQ ID NO: 2451 - RNA, 18 nt, Artificial Sequence
  Description of Artificial Sequence: Synthetic oligonucleotide
aaugcugcccuccuugcu

SEQ ID NO: 2452 - RNA, 18 nt, Artificial Sequence
  Description of Artificial Sequence: Synthetic oligonucleotide
cccccaaugcugcccucc

SEQ ID NO: 2453 - RNA, 18 nt, Artificial Sequence
  Description of Artificial Sequence: Synthetic oligonucleotide
cgcugcccccaaugcugc

SEQ ID NO: 2454 - RNA, 18 nt, Artificial Sequence
  Description of Artificial Sequence: Synthetic oligonucleotide
gcccccgcugcccccaau

SEQ ID NO: 2455 - RNA, 18 nt, Artificial Sequence
  Description of Artificial Sequence: Synthetic oligonucleotide
ccgcugcccccgcugccc

SEQ ID NO: 2456 - RNA, 18 nt, Artificial Sequence
  Description of Artificial Sequence: Synthetic oligonucleotide
cgccaccgcugcccccgc

SEQ ID NO: 2457 - RNA, 18 nt, Artificial Sequence
  Description of Artificial Sequence: Synthetic oligonucleotide
cccuccgccaccgcugcc

SEQ ID NO: 2458 - RNA, 18 nt, Artificial Sequence
  Description of Artificial Sequence: Synthetic oligonucleotide
ccacccccuccgccaccg

SEQ ID NO: 2459 - RNA, 18 nt, Artificial Sequence
  Description of Artificial Sequence: Synthetic oligonucleotide
gccccccacccccuccgc

SEQ ID NO: 2460 - RNA, 18 nt, Artificial Sequence
  Description of Artificial Sequence: Synthetic oligonucleotide
cuucagccccccaccccc

SEQ ID NO: 2461 - RNA, 18 nt, Artificial Sequence
  Description of Artificial Sequence: Synthetic oligonucleotide
gagggcuucagcccccca

SEQ ID NO: 2462 - RNA, 18 nt, Artificial Sequence
  Description of Artificial Sequence: Synthetic oligonucleotide
ugauggagggcuucagcc

SEQ ID NO: 2463 - RNA, 18 nt, Artificial Sequence
  Description of Artificial Sequence: Synthetic oligonucleotide
cuuggugauggagggcuu

SEQ ID NO: 2464 - RNA, 18 nt, Artificial Sequence
  Description of Artificial Sequence: Synthetic oligonucleotide
gccuuccuccugccuuca

SEQ ID NO: 2465 - RNA, 18 nt, Artificial Sequence
  Description of Artificial Sequence: Synthetic oligonucleotide
agcccgccuuccuccugc

SEQ ID NO: 2466 - RNA, 18 nt, Artificial Sequence
  Description of Artificial Sequence: Synthetic oligonucleotide
gacccagcccgccuuccu

SEQ ID NO: 2467 - RNA, 18 nt, Artificial Sequence
  Description of Artificial Sequence: Synthetic oligonucleotide
guugugacccagcccgcc

SEQ ID NO: 2468 - RNA, 18 nt, Artificial Sequence
  Description of Artificial Sequence: Synthetic oligonucleotide
ucccuguugugacccagc

SEQ ID NO: 2469 - RNA, 18 nt, Artificial Sequence
  Description of Artificial Sequence: Synthetic oligonucleotide
uucccucccuguugugac

SEQ ID NO: 2470 - RNA, 18 nt, Artificial Sequence
  Description of Artificial Sequence: Synthetic oligonucleotide
ccuucuucccucccuguu

SEQ ID NO: 2471 - RNA, 18 nt, Artificial Sequence
  Description of Artificial Sequence: Synthetic oligonucleotide
caucuccuucuucccucc

SEQ ID NO: 2472 - RNA, 18 nt, Artificial Sequence
  Description of Artificial Sequence: Synthetic oligonucleotide
ccccccaucuccuucuuc

SEQ ID NO: 2473 - RNA, 18 nt, Artificial Sequence
  Description of Artificial Sequence: Synthetic oligonucleotide
ccccaccccccaucuccu

SEQ ID NO: 2474 - RNA, 18 nt, Artificial Sequence
  Description of Artificial Sequence: Synthetic oligonucleotide
uucaaccccaccccccau

SEQ ID NO: 2475 - RNA, 18 nt, Artificial Sequence
  Description of Artificial Sequence: Synthetic oligonucleotide
ucuguuucaaccccaccc

SEQ ID NO: 2476 - RNA, 18 nt, Artificial Sequence
  Description of Artificial Sequence: Synthetic oligonucleotide
cagacucuguuucaaccc

SEQ ID NO: 2477 - RNA, 18 nt, Artificial Sequence
  Description of Artificial Sequence: Synthetic oligonucleotide
ggccacagacucuguuuc

SEQ ID NO: 2478 - RNA, 18 nt, Artificial Sequence
  Description of Artificial Sequence: Synthetic oligonucleotide
cuucaggccacagacucu

SEQ ID NO: 2479 - RNA, 18 nt, Artificial Sequence
  Description of Artificial Sequence: Synthetic oligonucleotide
uguaacuucaggccacag

SEQ ID NO: 2480 - RNA, 18 nt, Artificial Sequence
  Description of Artificial Sequence: Synthetic oligonucleotide
aagauuguaacuucaggc

SEQ ID NO: 2481 - RNA, 18 nt, Artificial Sequence
  Description of Artificial Sequence: Synthetic oligonucleotide
gcaagaagauuguaacuu

SEQ ID NO: 2482 - RNA, 18 nt, Artificial Sequence
  Description of Artificial Sequence: Synthetic oligonucleotide
aggaggcaagaagauugu

SEQ ID NO: 2483 - RNA, 18 nt, Artificial Sequence
  Description of Artificial Sequence: Synthetic oligonucleotide
ccaaaaggaggcaagaag

SEQ ID NO: 2484 - RNA, 18 nt, Artificial Sequence
  Description of Artificial Sequence: Synthetic oligonucleotide
aauggccaaaaggaggca

SEQ ID NO: 2485 - RNA, 18 nt, Artificial Sequence
  Description of Artificial Sequence: Synthetic oligonucleotide
uguuuaauggccaaaagg

SEQ ID NO: 2486 - RNA, 18 nt, Artificial Sequence
  Description of Artificial Sequence: Synthetic oligonucleotide
acauuuguuuaauggcca

SEQ ID NO: 2487 - RNA, 18 nt, Artificial Sequence
  Description of Artificial Sequence: Synthetic oligonucleotide
uauacacauuuguuuaau

SEQ ID NO: 2488 - RNA, 18 nt, Artificial Sequence
  Description of Artificial Sequence: Synthetic oligonucleotide
cccucuauacacauuugu

SEQ ID NO: 2489 - RNA, 18 nt, Artificial Sequence
  Description of Artificial Sequence: Synthetic oligonucleotide
gcaggcccucuauacaca

SEQ ID NO: 2490 - RNA, 18 nt, Artificial Sequence
  Description of Artificial Sequence: Synthetic oligonucleotide
acauagcaggcccucuau

SEQ ID NO: 2491 - RNA, 18 nt, Artificial Sequence
  Description of Artificial Sequence: Synthetic oligonucleotide
auggcacauagcaggccc

SEQ ID NO: 2492 - RNA, 18 nt, Artificial Sequence
  Description of Artificial Sequence: Synthetic oligonucleotide
agcacauggcacauagca

SEQ ID NO: 2493 - RNA, 18 nt, Artificial Sequence
  Description of Artificial Sequence: Synthetic oligonucleotide
ggcauagcacauggcaca

SEQ ID NO: 2494 - RNA, 18 nt, Artificial Sequence
  Description of Artificial Sequence: Synthetic oligonucleotide
ugccuggcauagcacaug

SEQ ID NO: 2495 - RNA, 18 nt, Artificial Sequence
  Description of Artificial Sequence: Synthetic oligonucleotide
cuuagugccuggcauagc

SEQ ID NO: 2496 - RNA, 18 nt, Artificial Sequence
  Description of Artificial Sequence: Synthetic oligonucleotide
guauccuuagugccuggc

SEQ ID NO: 2497 - RNA, 18 nt, Artificial Sequence
  Description of Artificial Sequence: Synthetic oligonucleotide
gugccguauccuuagugc

SEQ ID NO: 2498 - RNA, 18 nt, Artificial Sequence
  Description of Artificial Sequence: Synthetic oligonucleotide
guucagugccguauccuu

SEQ ID NO: 2499 - RNA, 18 nt, Artificial Sequence
  Description of Artificial Sequence: Synthetic oligonucleotide
agaggguucagugccgua

SEQ ID NO: 2500 - RNA, 18 nt, Artificial Sequence
  Description of Artificial Sequence: Synthetic oligonucleotide
ugcuaagaggguucagug

SEQ ID NO: 2501 - RNA, 18 nt, Artificial Sequence
  Description of Artificial Sequence: Synthetic oligonucleotide
gagagugcuaagaggguu

SEQ ID NO: 2502 - RNA, 18 nt, Artificial Sequence
  Description of Artificial Sequence: Synthetic oligonucleotide
ggaaugagagugcuaaga

SEQ ID NO: 2503 - RNA, 18 nt, Artificial Sequence
  Description of Artificial Sequence: Synthetic oligonucleotide
ccucuggaaugagagugc

SEQ ID NO: 2504 - RNA, 18 nt, Artificial Sequence
  Description of Artificial Sequence: Synthetic oligonucleotide
aauccccucuggaaugag

SEQ ID NO: 2505 - RNA, 18 nt, Artificial Sequence
  Description of Artificial Sequence: Synthetic oligonucleotide
ggauuaauccccucugga

SEQ ID NO: 2506 - RNA, 18 nt, Artificial Sequence
  Description of Artificial Sequence: Synthetic oligonucleotide
cuuauggauuaauccccu

SEQ ID NO: 2507 - RNA, 18 nt, Artificial Sequence
  Description of Artificial Sequence: Synthetic oligonucleotide
uucuacuuauggauuaau

SEQ ID NO: 2508 - RNA, 18 nt, Artificial Sequence
  Description of Artificial Sequence: Synthetic oligonucleotide
ccccauucuacuuaugga

SEQ ID NO: 2509 - RNA, 18 nt, Artificial Sequence
  Description of Artificial Sequence: Synthetic oligonucleotide
gucacccccauucuacuu

SEQ ID NO: 2510 - RNA, 18 nt, Artificial Sequence
  Description of Artificial Sequence: Synthetic oligonucleotide
uuccagucacccccauuc

SEQ ID NO: 2511 - RNA, 18 nt, Artificial Sequence
  Description of Artificial Sequence: Synthetic oligonucleotide
cccuauuccagucacccc

SEQ ID NO: 2512 - RNA, 18 nt, Artificial Sequence
  Description of Artificial Sequence: Synthetic oligonucleotide
gcuggcccuauuccaguc

SEQ ID NO: 2513 - RNA, 18 nt, Artificial Sequence
  Description of Artificial Sequence: Synthetic oligonucleotide
ccccagcuggcccuauuc

SEQ ID NO: 2514 - RNA, 18 nt, Artificial Sequence
  Description of Artificial Sequence: Synthetic oligonucleotide
ggauuaauccccucugga

SEQ ID NO: 2515 - RNA, 18 nt, Artificial Sequence
  Description of Artificial Sequence: Synthetic oligonucleotide
cuuauggauuaauccccu

SEQ ID NO: 2516 - RNA, 18 nt, Artificial Sequence
  Description of Artificial Sequence: Synthetic oligonucleotide
uucuacuuauggauuaau

SEQ ID NO: 2517 - RNA, 18 nt, Artificial Sequence
  Description of Artificial Sequence: Synthetic oligonucleotide
ccccauucuacuuaugga

SEQ ID NO: 2518 - RNA, 18 nt, Artificial Sequence
  Description of Artificial Sequence: Synthetic oligonucleotide
gucacccccauucuacuu

SEQ ID NO: 2519 - RNA, 18 nt, Artificial Sequence
  Description of Artificial Sequence: Synthetic oligonucleotide
uuccagucacccccauuc

SEQ ID NO: 2520 - RNA, 18 nt, Artificial Sequence
  Description of Artificial Sequence: Synthetic oligonucleotide
cccuauuccagucacccc

SEQ ID NO: 2521 - RNA, 18 nt, Artificial Sequence
  Description of Artificial Sequence: Synthetic oligonucleotide
gcuggcccuauuccaguc

SEQ ID NO: 2522 - RNA, 18 nt, Artificial Sequence
  Description of Artificial Sequence: Synthetic oligonucleotide
ccccagcuggcccuauuc

SEQ ID NO: 2523 - RNA, 18 nt, Artificial Sequence
  Description of Artificial Sequence: Synthetic oligonucleotide
caagcccccagcuggccc

SEQ ID NO: 2524 - RNA, 18 nt, Artificial Sequence
  Description of Artificial Sequence: Synthetic oligonucleotide
gccuccaagcccccagcu

SEQ ID NO: 2525 - RNA, 18 nt, Artificial Sequence
  Description of Artificial Sequence: Synthetic oligonucleotide
uucaugccuccaagcccc

SEQ ID NO: 2526 - RNA, 18 nt, Artificial Sequence
  Description of Artificial Sequence: Synthetic oligonucleotide
ugaucuucaugccuccaa

SEQ ID NO: 2527 - RNA, 18 nt, Artificial Sequence
  Description of Artificial Sequence: Synthetic oligonucleotide
ggaucugaucuucaugcc

SEQ ID NO: 2528 - RNA, 18 nt, Artificial Sequence
  Description of Artificial Sequence: Synthetic oligonucleotide
auucaggaucugaucuuc

SEQ ID NO: 2529 - RNA, 18 nt, Artificial Sequence
  Description of Artificial Sequence: Synthetic oligonucleotide
uucugauucaggaucuga

SEQ ID NO: 2530 - RNA, 18 nt, Artificial Sequence
  Description of Artificial Sequence: Synthetic oligonucleotide
uguuguucugauucagga

SEQ ID NO: 2531 - RNA, 18 nt, Artificial Sequence
  Description of Artificial Sequence: Synthetic oligonucleotide
ucuccuguuguucugauu

SEQ ID NO: 2532 - RNA, 18 nt, Artificial Sequence
  Description of Artificial Sequence: Synthetic oligonucleotide
gaauuucuccuguuguuc

SEQ ID NO: 2533 - RNA, 18 nt, Artificial Sequence
  Description of Artificial Sequence: Synthetic oligonucleotide
ccagagaauuucuccugu

SEQ ID NO: 2534 - RNA, 18 nt, Artificial Sequence
  Description of Artificial Sequence: Synthetic oligonucleotide
gaaugccagagaauuucu

SEQ ID NO: 2535 - RNA, 18 nt, Artificial Sequence
  Description of Artificial Sequence: Synthetic oligonucleotide
gaguugaaugccagagaa

SEQ ID NO: 2536 - RNA, 18 nt, Artificial Sequence
  Description of Artificial Sequence: Synthetic oligonucleotide
gaugugaguugaaugcca

SEQ ID NO: 2537 - RNA, 18 nt, Artificial Sequence
  Description of Artificial Sequence: Synthetic oligonucleotide
ccagagaugugaguugaa

SEQ ID NO: 2538 - RNA, 18 nt, Artificial Sequence
  Description of Artificial Sequence: Synthetic oligonucleotide
gaaugccagagaugugag

SEQ ID NO: 2539 - RNA, 18 nt, Artificial Sequence
  Description of Artificial Sequence: Synthetic oligonucleotide
ccucugaaugccagagau

SEQ ID NO: 2540 - RNA, 18 nt, Artificial Sequence
  Description of Artificial Sequence: Synthetic oligonucleotide
uaucaccucugaaugcca

SEQ ID NO: 2541 - RNA, 18 nt, Artificial Sequence
  Description of Artificial Sequence: Synthetic oligonucleotide
gccuuuaucaccucugaa

SEQ ID NO: 2542 - RNA, 18 nt, Artificial Sequence
  Description of Artificial Sequence: Synthetic oligonucleotide
cuguagccuuuaucaccu

SEQ ID NO: 2543 - RNA, 18 nt, Artificial Sequence
  Description of Artificial Sequence: Synthetic oligonucleotide
cccugcuguagccuuuau

SEQ ID NO: 2544 - RNA, 18 nt, Artificial Sequence
  Description of Artificial Sequence: Synthetic oligonucleotide
uauugcccugcuguagcc

SEQ ID NO: 2545 - RNA, 18 nt, Artificial Sequence
  Description of Artificial Sequence: Synthetic oligonucleotide
aguccuauugcccugcug

SEQ ID NO: 2546 - RNA, 18 nt, Artificial Sequence
  Description of Artificial Sequence: Synthetic oligonucleotide
gucccaguccuauugccc

SEQ ID NO: 2547 - RNA, 18 nt, Artificial Sequence
  Description of Artificial Sequence: Synthetic oligonucleotide
cgacagucccaguccuau

SEQ ID NO: 2548 - RNA, 18 nt, Artificial Sequence
  Description of Artificial Sequence: Synthetic oligonucleotide
ggagacgacagucccagu

SEQ ID NO: 2549 - RNA, 18 nt, Artificial Sequence
  Description of Artificial Sequence: Synthetic oligonucleotide
ccaaaggagacgacaguc

SEQ ID NO: 2550 - RNA, 18 nt, Artificial Sequence
  Description of Artificial Sequence: Synthetic oligonucleotide
cacagccaaaggagacga

SEQ ID NO: 2551 - RNA, 18 nt, Artificial Sequence
  Description of Artificial Sequence: Synthetic oligonucleotide
aacagcacagccaaagga

SEQ ID NO: 2552 - RNA, 18 nt, Artificial Sequence
  Description of Artificial Sequence: Synthetic oligonucleotide
agggcaacagcacagcca

SEQ ID NO: 2553 - RNA, 18 nt, Artificial Sequence
  Description of Artificial Sequence: Synthetic oligonucleotide
uuuagagggcaacagcac

SEQ ID NO: 2554 - RNA, 18 nt, Artificial Sequence
  Description of Artificial Sequence: Synthetic oligonucleotide
guacauuuagagggcaac

SEQ ID NO: 2555 - RNA, 18 nt, Artificial Sequence
  Description of Artificial Sequence: Synthetic oligonucleotide
gcaggguacauuuagagg

SEQ ID NO: 2556 - RNA, 18 nt, Artificial Sequence
  Description of Artificial Sequence: Synthetic oligonucleotide
aaaaagcaggguacauuu

SEQ ID NO: 2557 - RNA, 18 nt, Artificial Sequence
  Description of Artificial Sequence: Synthetic oligonucleotide
gugggaaaaagcagggua

SEQ ID NO: 2558 - RNA, 18 nt, Artificial Sequence
  Description of Artificial Sequence: Synthetic oligonucleotide
aaaaggugggaaaaagca

SEQ ID NO: 2559 - RNA, 18 nt, Artificial Sequence
  Description of Artificial Sequence: Synthetic oligonucleotide
gaaagaaaaggugggaaa

SEQ ID NO: 2560 - RNA, 18 nt, Artificial Sequence
  Description of Artificial Sequence: Synthetic oligonucleotide
acagagaaagaaaaggug

SEQ ID NO: 2561 - RNA, 18 nt, Artificial Sequence
  Description of Artificial Sequence: Synthetic oligonucleotide
ggcgaacagagaaagaaa

SEQ ID NO: 2562 - RNA, 18 nt, Artificial Sequence
  Description of Artificial Sequence: Synthetic oligonucleotide
gugagggcgaacagagaa

SEQ ID NO: 2563 - RNA, 18 nt, Artificial Sequence
  Description of Artificial Sequence: Synthetic oligonucleotide
uggauggugucugagaau

SEQ ID NO: 2564 - RNA, 18 nt, Artificial Sequence
  Description of Artificial Sequence: Synthetic oligonucleotide
caauguggauggugucug

SEQ ID NO: 2565 - RNA, 18 nt, Artificial Sequence
  Description of Artificial Sequence: Synthetic oligonucleotide
ggguucaauguggauggu

SEQ ID NO: 2566 - RNA, 18 nt, Artificial Sequence
  Description of Artificial Sequence: Synthetic oligonucleotide
gcucagaggcuggcauug

SEQ ID NO: 2567 - RNA, 18 nt, Artificial Sequence
  Description of Artificial Sequence: Synthetic oligonucleotide
uguccgcucagaggcugg

SEQ ID NO: 2568 - RNA, 18 nt, Artificial Sequence
  Description of Artificial Sequence: Synthetic oligonucleotide
gccacuguccgcucagag

SEQ ID NO: 2569 - RNA, 18 nt, Artificial Sequence
  Description of Artificial Sequence: Synthetic oligonucleotide
cccaggccacuguccgcu

SEQ ID NO: 2570 - RNA, 18 nt, Artificial Sequence
  Description of Artificial Sequence: Synthetic oligonucleotide
ggagacccaggccacugu

SEQ ID NO: 2571 - RNA, 18 nt, Artificial Sequence
  Description of Artificial Sequence: Synthetic oligonucleotide
auguuggagacccaggcc

SEQ ID NO: 2572 - RNA, 18 nt, Artificial Sequence
  Description of Artificial Sequence: Synthetic oligonucleotide
gaggcauguuggagaccc

SEQ ID NO: 2573 - RNA, 18 nt, Artificial Sequence
  Description of Artificial Sequence: Synthetic oligonucleotide
caggugaggcauguugga

SEQ ID NO: 2574 - RNA, 18 nt, Artificial Sequence
  Description of Artificial Sequence: Synthetic oligonucleotide
gccgacaggugaggcaug

SEQ ID NO: 2575 - RNA, 18 nt, Artificial Sequence
  Description of Artificial Sequence: Synthetic oligonucleotide
ugucagccgacaggugag

SEQ ID NO: 2576 - RNA, 18 nt, Artificial Sequence
  Description of Artificial Sequence: Synthetic oligonucleotide
cucgaugucagccgacag

SEQ ID NO: 2577 - RNA, 18 nt, Artificial Sequence
  Description of Artificial Sequence: Synthetic oligonucleotide
gcacucucgaugucagcc

SEQ ID NO: 2578 - RNA, 18 nt, Artificial Sequence
  Description of Artificial Sequence: Synthetic oligonucleotide
ugugggcacucucgaugu

SEQ ID NO: 2579 - RNA, 18 nt, Artificial Sequence
  Description of Artificial Sequence: Synthetic oligonucleotide
cucgaugugggcacucuc

SEQ ID NO: 2580 - RNA, 18 nt, Artificial Sequence
  Description of Artificial Sequence: Synthetic oligonucleotide
ucccgcucgaugugggca

SEQ ID NO: 2581 - RNA, 18 nt, Artificial Sequence
  Description of Artificial Sequence: Synthetic oligonucleotide
acucuucccgcucgaugu

SEQ ID NO: 2582 - RNA, 18 nt, Artificial Sequence
  Description of Artificial Sequence: Synthetic oligonucleotide
cuuguacucuucccgcuc

SEQ ID NO: 2583 - RNA, 18 nt, Artificial Sequence
  Description of Artificial Sequence: Synthetic oligonucleotide
uugagcuuguacucuucc

SEQ ID NO: 2584 - RNA, 18 nt, Artificial Sequence
  Description of Artificial Sequence: Synthetic oligonucleotide
acuccuugagcuuguacu

SEQ ID NO: 2585 - RNA, 18 nt, Artificial Sequence
  Description of Artificial Sequence: Synthetic oligonucleotide
ugaguacuccuugagcuu

SEQ ID NO: 2586 - RNA, 18 nt, Artificial Sequence
  Description of Artificial Sequence: Synthetic oligonucleotide
gauuuugaguacuccuug

SEQ ID NO: 2587 - RNA, 18 nt, Artificial Sequence
  Description of Artificial Sequence: Synthetic oligonucleotide
ccaucgauuuugaguacu

SEQ ID NO: 2588 - RNA, 18 nt, Artificial Sequence
  Description of Artificial Sequence: Synthetic oligonucleotide
cucauccaucgauuuuga

SEQ ID NO: 2589 - RNA, 18 nt, Artificial Sequence
  Description of Artificial Sequence: Synthetic oligonucleotide
cggcucucauccaucgau

SEQ ID NO: 2590 - RNA, 18 nt, Artificial Sequence
  Description of Artificial Sequence: Synthetic oligonucleotide
ccagccggcucucaucca

SEQ ID NO: 2591 - RNA, 18 nt, Artificial Sequence
  Description of Artificial Sequence: Synthetic oligonucleotide
ccuauccagccggcucuc

SEQ ID NO: 2592 - DNA, 1729 bp, Homo sapiens
ctctatggacatggctcgcctcccctccccaaccaaggaaaagccacccccaccaccgcctggtggtggtaaagacctgttctatgtaagccgtccacccctggcccgttcctcaccagcatactgcacgagcagctcggacatcacagagccagagcagaagatgctgagtgtcaacaagagtgtgtccatgctggacttacagggtgatgggcctggtggccgcctcaacagcagcagtgtttcgaacctggcggccgtaggggacctgctgcactcaagccaggcctcgctgacagcagccttggggctacggcctgcgcctgccggacgcctctcccaggggagtggctcatccatcacggcggctggcatgcgcctcagccagatgggtgtcaccacagacggtgtccctgcccagcaactgcgaatccccctctccttccagaaccctctcttccacatggctgctgatgggccaggtcccccaggcggccatggagggggcggtggccatggcccaccttcctcccatcaccaccaccaccaccatcaccaccaccgaggtggagagccccctggggacacctttgccccattccatggctatagcaagagtgaggacctctcttccggggtccccaagccccctgctgcctccatccttcatagccacagctacagtgatgagtttggaccctctggcactgacttcacccgtcggcagctttcactccaggacaacctgcagcacatgctgtcccctccccagatcaccattggtccccagaggccagccccctcagggcctggaggtgggagcggtgggggcagcggtgggggtggcgggggccagccgcctccattgcagaggggcaagtctcagcagttgacagtcagcgcagcccagaaaccccggccatccagcgggaatctattgcagtccccagagccaagttatggccccgcccgtccacggcaacagagcctcagcaaggagggcagcattgggggcagcgggggcagcggtggcggagggggtggggggctgaagccctccatcaccaagcaggtaggtgaaggcaggaggaaggcgggctgggtcacaacagggagggaagaaggagatggggggtggggttgaaacagagtctgtggcctgaagttacaatcttcttgcctccttttggccattaaacaaatgtgtatagagggcctgctatgtgccatgtgctatgccaggcactaaggatacggcactgaaccctcttagcactctcattccagaggggattaatccataagtagaatgggggtgactggaatagggccagctgggggcttggaggcatgaagatcagatcctgaatcagaacaacaggagaaattctctggcattcaactcacatctctggcattcagaggtgataaaggctacagcagggcaataggactgggactgtcgtctcctttggctgtgctgttgccctctaaatgtaccctgctttttcccaccttttctttctctgttcgccctcactgtgccttgtcccagcattctcagacaccatccacattgaaccccacaatgccagcctctgagcggacagtggcctgggtctccaacatgcctcacctgtcggctgacatcgagagtgcccacatcgagcgggaagagtacaagctcaaggagtactcaaaatcgatggatgagagccggctggatagg

SEQ ID NO: 2593 - DNA, 3031 bp, Homo sapiens
gtggttgtgaatgcccttttaggagcaattccatccatcatgaatgtgcttctggtttgtcttatattctggctaattttcagcatcatgggcgtaaatttgtttgctggcaaattctaccactgtattaacaccacaactggtgacaggtttgacatcgaagacgtgaataatcatactgattgcctaaaactaatagaaagaaatgagactgctcgatggaaaaatgtgaaagtaaactttgataatgtaggatttgggtatctctctttgcttcaagttgtaagtgaacactattttctctgaatatttttattgtttggaataataacaaaataatgacatacatctattatttagttcctaagaaaaagtatatatttctttctatttaaaaaatttcaatttgttagtacaagtttatgagcccagatgggtgaaaactttattacatgtaaggactgcagatatagtcagtagtgaccagaccaaacaaagacctctttgtcttttttcttgtattttctttgtttctatattgctctttctatataaacaagtaaattaataaatcagtaactttgccattttttattgtgattagaaggcttgtttccctgatcagctaccaaaacggaatacacttaacagatagatcatcttccaaaacacatacacttaatacacctaattggattgtaattaattggtagggattaactgctgctgagttctattatttggatcaaagtttggggaatgacatttaggttttagaattagaaccaggcatagcggtgggtgccactgcactccagcctgggcaacaaagagtgaaactccatctaaaaaaaaaaaaaaaaaaaaaaaaaaagagagagaattatacctggaagcaactagaaacaaaaatgaagcaaaagcagctgttgtcttatctcaaatgacctttcagcaccattatttaagtctattttgtcctaaatattaatgttttcactactgggtctctaagactgggtctccaagaaaaatagtttataatttatatttaaaaaaggtagccctttaaacattttcatttgattctgcttctagctgcagcagcaccacaacaaagcagggaataaaataagagtccagattatttgaaaactcagcttaaaaaaaaaagactgtacaatttctttcttcccttgtggttctacagtgtctttagggcagaaatcaatttttgctcaccaaggttatgatttcaactgttcaaccagaagactaactaagcaaacaaaccaacactggtcaaaacccttttgcagctcttccagaggtgtcaactatgattactttacaaattcttcccacctttttgttggaaattcttatttctcttcttaacatttttgatctactctgaataatattcatgcaattaaaatagagattttttaaatctggtaagaacgggtggggcatggtggctcatgcctgtaatcctagctctttgggaggccaaagctggaggattgcttgaggccaggagatctagaccagtggaggcaacatagtgagaccttgtctctaaagacaaataaaaacaaaagttaaaaaaaatctagcaagaatgctttctttaaaaattgtcgacacatgatgatatttatttgggcacttattctaacccttaactaatgaccatacttgtaaatatcactaaagcaaccacctcctccataaatttgaggaaagaaaaattaaaaattttaagcaatcctttaaaatgtaagcaattctgaaaatacagtgatggtcctgcacaaagctattaaataaattctgccaccaaaaaaaaaaaaaaccctctaaaatactgcttcacatttggcttttatagaatcacctctctattgattagtaagtcattgaaatggtcccttgaatcacttttttgtttctataccaagtgtgtaatggaattgttctatcattgacctaagccactgacatatttaacacatctctctctctttcatatacaaaagccttgtactttctagctaggaatcattactttcttttcactgctgtcacccacacccttgcttagcttttgtctcatgaaatccaccacctcacaagggttagcgttatcagaacaaagatatattgtgatacagacgctaaaggctttgctaacctccctcactagctaagggataatccttttaggcccacaggactcaaaattcatgccccaggacaagtaacaaattactgtaagttgttagcctgagtatccttcatcctgtgagtgccaagtgtctgctgtactattgttcacatttcttattcatattaacttattatcttcaagaatttcagaaagaaaatagaatagggggttatttctaaatgttttgatgcaaaattcttaaaaggattgtatttctaaatgttttgctccaaaattcttaaaaggatagttgcaaccctgcctttatgtatcctggtactatccttacattgttacaataaagagaaatcttaaattttcaatcactttgatcaccctgcagataaattttagcagatgatccttagatctaagttgtaattatttggctgatagagctattgacccatgtgttggcatttgtaagactttctaaaaagtgctccagcaaattttaatactgctttaaatatcatgacaccatgaactctaaagaattgaaaagtgcttgtgagttggttatcaaggggaggatatatcaaatggccattttgttcaatatgtgttctagaaatgaaaagccatactaaaatactgtcttggtccaaaatctgtgtaaaatttgttttgaaatgtctttcaaaaatattcccttttgaaaattatatcagtaagaatatttattaaacatcaggtctaaattatttttactccaaagtaaaacatgcatgtccttcttaataggccacattcaaaggatggatggatataatgtatgcagcagttgattccagaaat

SEQ ID NO: 2594 - DNA, 5847 bp, Homo sapiens
gctgatgctggtggaggaggagctgcgccgggaccaccccgccatggctgagccgctgccagaacccaagaagaggctgctcgacgctcaggtggaaattacaatgtcatttatcttctccgtgtcccatccccatccatcccactgtctttcgtgcactcactacaccagccacctagccccatcaccatctgtctctcatagtctgctgtttgtccactggctgctcctggcagccccctagtgaccccatcttcatcccatcgtctgtgcctttgtcactcctggcagcgtcagcccaactcctgtgccttcccatccagtcttcccactcctctctgcatctcaggaccttctctaccagaaccttggtctttctgcccctagaccccacctagttccaagaacccctgccccttctttgctcactcctattcaagccacgttgttcagcttcctctgcgctcttgggccagagggctagaagctgccgttttctggaatagagcacagggcagtatgatctgtagtttctccaggccctggccggtaccctgaaaacttggggacccatcacctctgttctcttggctccctaattttcctgtctccttggcagctcctgcatagcttcctcttcctgactcttcagatcttgaaggccttccatcctgtaacctccctttgccctcagtatttaagtccagcctccctctggcctccctcccactctggccctcagaccttcccagctgcctgctgcccagcctctcttctcacaagccagcttctaggacctcccttctgcacccttaccccttgctttcccaaaattctgctcattttcctacccatactcctctttgctctgactgctaggctccccccgcctgccatccccccaccaaggctcctgaccccatgaccccactctctcccactgcagctcctcatcaggtaattctcctggttccgctttggccacgggcggaggacacagggggaggtgactccggaccactgcaggttggtcgtgaagcccactccctccaacacctccggagcctctcccctctcactgctgccctccacacccagagaacctccacagactccagccctccgacacctgcacagatccatctcccaagacaccacccaaagagagcatttgctgctgcttcccagaactgtccaacaataccttagcaacaccaagagttgggccctagatgggcccagcacattcacaggtcacacccacttccctgcaaaacccaccccctcccagcctcctcctgactctaagccctcctcttcctctacctctccagtgtatgtctgtcaccccccatttcaccagagcgtccttaggggctgggggtgggtttgttaatggggtggaggcaatgatgggttggaggatcttggctataggggctgtgctgactgcagcaggtaggttgggtttccctcttccttccctaatcttggttctctaccctcctttccactcctcacctgattctctctcttcctcctccttatatctgtgaggcagaaggcatctgaagctcatattagcccccattgggtgggaattaggagtgggtagttaactcagggagacttgagataccctggaaaaaatgctattgagatgtcctgacattaggcagggtggatggaacaagaaggagcaagaaaggaacctcaggcagatgttaggacatggacttgatcatgtggcctgggagtttagaaatggggagagacatcctcctagatcagatcgtgggctcagtaggcatgttgattcccagggagaggtgccaggaacagcatggtaaagaatgtactcttcacagctcacatccccaggttgctgatgccactcactccccctctcctgccatcgagtggccttgccggacacatcaccctacctaaaaagccagtaaatgagaacctgtcagctatagccatcatttctgagatgcgattttctttgggattgagctgcagtgggcagtggctccttacactgtaattttaattctctgcctgcccagcctctctgtcaaagtagctggtgatctataaagatgctaaaaggcaccaggggactttgccatttaaaggactcctgcagtgaattcttttgtaaaatgaataatggcaccctaatttatccactttctaaatttgggtccatgggggtgtccagggcatgcttatgtgctgtcaccagcagacaaacagagggaatggaatctgggggttccttccctgctctcccgccatactcaggataccctaccataagtgatttcctctcactgacttgcagaaaatgtgtgagatacccagcaagctaagaaggcagttttgctgggtatctcatacccaaggctggggtttgggtgatctgagaggttagctccttgatcctaggatggaagggagagcttatatagaagcttttacttggaaggttttgtatcctaaggtcagacatagctatattaccaagcctaaatgccatgtggcccaggaaataatttggacatttgttctaaaccacttgtggtaggtattggtctctctgcaactcagccattaattagaaattagttttgagcctgaattttaaaaagccaagtgttgcccccagcccacacacacacacacggacatgtacagtacaaaccccagataattacaacagccaaagagagaaggaagtgaatttcccaaccagaagcgtagggaaattcagatggctttcttttctcccagcagaggaacagaaggcggagctaagggcaggaaccaggagttggtcaaggagctataggaggtgatgagagtagaaccaggggtaggagctggtctggtacccctcaccctctaattgggagcccagggagaaggactgaaaagaagatgggagtggaaaagaataaagccagtttctgcttcccagggatgcagagattggggcatgctgtgtctgcagaagctcctagtcatttccgccataattgtgagagagaggggcagccctcccacaagatttttcccttcccatatcacttccctgaatccccttcctttccccccagtacagttaaacctctctctaatttggaatgttatatttgagaagatggccactgtgaataagtgacaaacggaatgacagtgtctatttaatgaaatgcatgtcttcaaaatatatacagaactcgatgaacaaggctttttccactcctcagggagcatgcattaatgaatagataggattcaaaagtctgttttctggtatgggttaaatatcccctcctacagacatatttccaccactaatttgcttagtacaccttttcttcacagataaaggaaaatgcaagctcagtttttcttcagattatgaagaaattccaaatccacaggggtttggattaatgaggttttgctgtactgcctccccttattcctcaacatgaagttcccacctcggattggggatgggtgggagggggtttcaagaggaggagggtgggatgggcaaggaatatacacaggtgaagccagagaagggttaggttgggggtgcggtgggaacttgctgttttgatctggtttcctggtgtgacactctgggttaaaggcttgaaggcccctgttaggagtctaggggtgagattctcttctctctgatcccagaggacgttaacttctactgcaggtgagaaacaaaataggaggatggtggggactgtcctgggaggagggggtggtccatggcttgtggtgtgggctggctataggggaggccactgctaggggactggcatccaggcccccttgaagcgtctcaataagtccgcgctctcctttttggtgtcttgcaggagaggcagcttccccccttgggtccaacaaacccgcgtgtgacgctggccccaccgtggaatggcctggcccccccagccccaccacccccaccccggctgcagattacggagaacggcgagttccgaaacaccgcagaccactagcccacccagcatcagagaccttctcttcctttcctgtgcaccccaccctgtaacagcaccaaccaccaggattggacatcaccgaggaacagcgggattgcctccccgaatgcctccctgggaggcacactgattgcccacccccaccactgcaccatttccaggagggagagtggggaccctcagccgcccccttttccttcccattggggtgctgccctctctttgacccccagggacccttgccccaggacaccgcctaccccgtacagaccccttcactccggggtgctatccccatcctctgcctcatcgttcccctgagcactgggggacagaccctcacccccaccctgggggtgtggcacctccaaactttcaacttcagggtgatttttttagcagtaaccagagctgacaatctaactcccctccaccgccccattttggcctcccctgccccccttgttatggggaggggaccccgggtgagggggccctattaccccttgatttctcaggagcgtctgggggggctcagcacgcacaaactccttctccttctaccactcttaaatttactccctccccacccagaacccagatggggtggagggggccaccggggcagggagggggcggcaaggggggaatgggagttgtctccccttctccccacacctgatctgctctcggctggtcccagagcggggtgagggggcttatgcccccccctcccccagtgtgttgggtggggtggaattgaggttagggtgaggggtcagggtttaggagggtgtgtatgttgggaggacaggctagttgatctgtcctactctgacacacagtcccctctgccccttccttctctcttcttggtctctactcccagggggaggggggaacttactctaggaaaagccatgtctctctcccccagggtggggggacctgtgttggaggaggggtgttggggggcccccttccatgactctgtcccctgggggaggtaggacagggctgggcttccctctcatcctccccctcccaatctccttccacctccctccctcccgccagctccacgatttttcggtgtttctctgtacatagttttctggcgggataggggaggtaggatggatggggtttggggtgggtaggccatgggaggggagaagcccctccttggcaccccctcttccctgactgctgtcccctacccagccttgcccccttcatccttttgcgtttggtattgagactctcctagactctactcctctttcttttgtatggacagttccccttcagtcccatccccctacacatacacccagccggggccaaatttatacttatataaaagttgtaaatatgtgaaattttatccctgtgccctttccccacctcaggccctacccctggaccctccccaaccttccttctctcttctttggctgttgtaattatctggggtttgtactgtacatatccggggtgtgtgtgtgtgggctgggggcaacccttctgtacagagcttcctggccccctccccccccgcccctctgcttccctccccacccaccacctcaagggtagggagttgctcttcctacctgttttattttgttttctcgttctccctccccaccccactcccagccttatctatcccccctcactgtccccttttctccactcccagccccatttcctttttttctggagtgtgtggtgaaacagaaaaaaacatgtttaataaacggagattgttctttta

SEQ ID NO: 2595 - DNA, 5847 bp, Homo sapiens
gctgatgctggtggaggaggagctgcgccgggaccaccccgccatggctgagccgctgccagaacccaagaagaggctgctcgacgctcaggtggaaattacaatgtcatttatcttctccgtgtcccatccccatccatcccactgtctttcgtgcactcactacaccagccacctagccccatcaccatctgtctctcatagtctgctgtttgtccactggctgctcctggcagccccctagtgaccccatcttcatcccatcgtctgtgcctttgtcactcctggcagcgtcagcccaactcctgtgccttcccatccagtcttcccactcctctctgcatctcaggaccttctctaccagaaccttggtctttctgcccctagaccccacctagttccaagaacccctgccccttctttgctcactcctattcaagccacgttgttcagcttcctctgcgctcttgggccagagggctagaagctgctgttttctggaatagagcacagggcagtatgatctgtagtttctccaggccctggccggtaccctgaaaacttggggacccatcacctctgttctcttggctccctaattttcctgtctccttggcagctcctgcatagcttcctcttcctgactcttcagatcttgaaggccttccatcctgtaacctccctttgccctcagtatttaagtccagcctccctctggcctccctcccactctggccctcagaccttcccagctgcctgctgcccagcctctcttctcacaagccagcttctaggacctcccttctgcacccttaccccttgctttcccaaaattctgctcattttcctacccatactcctctttgctctgactgctaggctccccccgcctgccatccccccaccaaggctcctgaccccatgaccccactctctcccactgcagctcctcatcaggtaattctcctggttccgctttggccacgggcggaggacacagggggaggtgactccggaccactgcaggttggtcgtgaagcccactccctccaacacctccggagcctctcccctctcactgctgccctccacacccagagaacctccacagactccagccctccgacacctgcacagatccatctcccaagacaccacccaaagagagcatttgctgctgcttcccagaactgtccaacaataccttagcaacaccaagagttgggccctagatgggcccagcacattcacaggtcacacccacttccctgcaaaacccaccccctcccagcctcctcctgactctaagccctcctcttcctctacctctccagtgtatgtctgtcaccccccatttcaccagagcgtccttaggggctgggggtgggtttgttaatggggtggaggcaatgatgggttggaggatcttggctataggggctgtgctgactgcagcaggtaggttgggtttccctcttccttccctaatcttggttctctaccctcctttccactcctcacctgattctctctcttcctcctccttatatctgtgaggcagaaggcatctgaagctcatattagcccccattgggtgggaattaggagtgggtagttaactcagggagacttgagataccctggaaaaaatgctattgagatgtcctgacattaggcagggtggatggaacaagaaggagcaagaaaggaacctcaggcagatgttaggacatggacttgatcatgtggcctgggagtttagaaatggggagagacatcctcctagatcagatcgtgggctcagtaggcatgttgattcccagggagaggtgccaggaacagcatggtaaagaatgtactcttcacagctcacatccccaggttgctgatgccactcactccccctctcctgccatcgagtggccttgccggacacatcaccctacctaaaaagccagtaaatgagaacctgtcagctatagccatcatttctgagatgcgattttctttgggattgagctgcagtgggcagtggctccttacactgtaattttaattctctgcctgcccagcctctctgtcaaagtagctggtgatctataaagatgctaaaaggcaccaggggactttgccatttaaaggactcctgcagtgaattcttttgtaaaatgaataatggcaccctaatttatccactttctaaatttgggtccatgggggtgtccagggcatgcttatgtgctgtcaccagcagacaaacagagggaatggaatctgggggttccttccctgctctcccgccatactcaggataccctaccataagtgatttcctctcactgacttgcagaaaatgtgtgagatacccagcaagctaagaaggcagttttgctgggtatctcatacccaaggctggggtttgggtgatctgagaggttagctccttgatcctaggatggaagggagagcttatatagaagcttttacttggaaggttttgtatcctaaggtcagacatagctatattaccaagcctaaatgccatgtggcccaggaaataatttggacatttgttctaaaccacttgtggtaggtattggtctctctgcaactcagccattaattagaaattagttttgagcctgaattttaaaaagccaagtgttgcccccagcccacacacacacacacggacatgtacagtacaaaccccagataattacaacagccaaagagagaaggaagtgaatttcccaaccagaagcgtagggaaattcagatggctttcttttctcccagcagaggaacagaaggcggagctaagggcaggaaccaggagttggtcaaggagctataggaggtgatgagagtagaaccaggggtaggagctggtctggtacccctcaccctctaattgggagcccagggagaaggactgaaaagaagatgggagtggaaaagaataaagccagtttctgcttcccagggatgcagagattggggcatgctgtgtctgcagaagctcctagtcatttccgccataattgtgagagagaggggcagccctcccacaagatttttcccttcccatatcacttccctgaatccccttcctttccccccagtacagttaaacctctctctaatttggaatgttatatttgagaagatggccactgtgaataagtgacaaacggaatgacagtgtctatttaatgaaatgcatgtcttcaaaatatatacagaactcgatgaacaaggctttttccactcctcagggagcatgcattaatgaatagataggattcaaaagtctgttttctggtatgggttaaatatcccctcctacagacatatttccaccactaatttgcttagtacaccttttcttcacagataaaggaaaatgcaagctcagtttttcttcagattatgaagaaattccaaatccacaggggtttggattaatgaggttttgctgtactgcctccccttattcctcaacatgaagttcccacctcggattggggatgggtgggagggggtttcaagaggaggagggtgggatgggcaaggaatatacacaggtgaagccagagaagggttaggttgggggtgcggtgggaacttgctgttttgatctggtttcctggtgtgacactctgggttaaaggcttgaaggcccctgttaggagtctaggggtgagattctcttctctctgatcccagaggacgttaacttctactgcaggtgagaaacaaaataggaggatggtggggactgtcctgggaggagggggtggtccatggcttgtggtgtgggctggctataggggaggccactgctaggggactggcatccaggcccccttgaagcgtctcaataagtccgcgctctcctttttggtgtcttgcaggagaggcagcttccccccttgggtccaacaaacccgcgtgtgacgctggccccaccgtggaatggcctggcccccccagccccaccacccccaccccggctgcagattacggagaacggcgagttccgaaacaccgcagaccactagcccacccagcatcagagaccttctcttcctttcctgtgcaccccaccctgtaacagcaccaaccaccaggattggacatcaccgaggaacagcgggattgcctccccgaatgcctccctgggaggcacactgattgcccacccccaccactgcaccatttccaggagggagagtggggaccctcagccgcccccttttccttcccattggggtgctgccctctctttgacccccagggacccttgccccaggacaccgcctaccccgtacagaccccttcactccggggtgctatccccatcctctgcctcatcgttcccctgagcactgggggacagaccctcacccccaccctgggggtgtggcacctccaaactttcaacttcagggtgatttttttagcagtaaccagagctgacaatctaactcccctccaccgccccattttggcctcccctgccccccttgttatggggaggggaccccgggtgagggggccctattaccccttgatttctcaggagcgtctgggggggctcagcacgcacaaactccttctccttctaccactcttaaatttactccctccccacccagaacccagatggggtggagggggccaccggggcagggagggggcggcaaggggggaatgggagttgtctccccttctccccacacctgatctgctctcggctggtcccagagcggggtgagggggcttatgcccccccctcccccagtgtgttgggtggggtggaattgaggttagggtgaggggtcagggtttaggagggtgtgtatgttgggaggacaggctagttgatctgtcctactctgacacacagtcccctctgccccttccttctctcttcttggtctctactcccagggggaggggggaacttactctaggaaaagccatgtctctctcccccagggtggggggacctgtgttggaggaggggtgttggggggcccccttccatgactctgtcccctgggggaggtaggacagggctgggcttccctctcatcctccccctcccaatctccttccacctccctccctcccgccagctccacgatttttcggtgtttctctgtacatagttttctggcgggataggggaggtaggatggatggggtttggggtgggtaggccatgggaggggagaagcccctccttggcaccccctcttccctgactgctgtcccctacccagccttgcccccttcatccttttgcgtttggtattgagactctcctagactctactcctctttcttttgtatggacagttccccttcagtcccatccccctacacatacacccagccggggccaaatttatacttatataaaagttgtaaatatgtgaaattttatccctgtgccctttccccacctcaggccctacccctggaccctccccaaccttccttctctcttctttggctgttgtaattatctggggtttgtactgtacatatccggggtgtgtgtgtgtgggctgggggcaacccttctgtacagagcttcctggccccctccccccccgcccctctgcttccctccccacccaccacctcaagggtagggagttgctcttcctacctgttttattttgttttctcgttctccctccccaccccactcccagccttatctatcccccctcactgtccccttttctccactcccagccccatttcctttttttctggagtgtgtggtgaaacagaaaaaaacatgtttaataaacggagattgttctttta

What is claimed is:

1. A method of treating a Autosomal Dominant Mental Retardation 5 (MRD5) or Dravet Syndrome (DS) in a subject in need thereof, by increasing the expression of a target protein or functional RNA by cells of the subject, wherein the cells have a retained-intron-containing pre-mRNA (RIC pre-mRNA), the RIC pre-mRNA comprising a retained intron, an exon flanking the 5′ splice site, an exon flanking the 3′ splice site, and wherein the RIC pre-mRNA encodes the target protein or functional RNA, the method comprising contacting the cells of the subject with an antisense oligomer (ASO) complementary to a targeted portion of the RIC pre-mRNA encoding the target protein or functional RNA, whereby the retained intron is constitutively spliced from the RIC pre-mRNA encoding the target protein or functional RNA, thereby increasing the level of mRNA encoding the target protein or functional RNA, and increasing the expression of the target protein or functional RNA in the cells of the subject.

2. A method of increasing expression of a target protein, wherein the target protein is SYNGAP1 or SCN1A, by cells having a retained-intron-containing pre-mRNA (RIC pre-mRNA), the RIC pre-mRNA comprising a retained intron, an exon flanking the 5′ splice site of the retained intron, an exon flanking the 3′ splice site of the retained intron, and wherein the RIC pre-mRNA encodes SYNGAP1 or SCN1A protein, the method comprising contacting the cells with an antisense oligomer (ASO) complementary to a targeted portion of the RIC pre-mRNA encoding SYNGAP1 or SCN1A protein, whereby the retained intron is constitutively spliced from the RIC pre-mRNA encoding SYNGAP1 or SCN1A protein, thereby increasing the level of mRNA encoding SYNGAP1 or SCN1A protein, and increasing the expression of SYNGAP1 or SCN1A protein in the cells.

3. The method of claim 1, wherein the method is a method of treating MRD5 and the target protein is SYNGAP1, or the method is a method of treating DS and the target protein is SCN1A.

4. The method of claim 1, wherein the target protein or the functional RNA is a compensating protein or a compensating functional RNA that functionally augments or replaces a target protein or functional RNA that is deficient in amount or activity in the subject.

5. The method of claim 2, wherein the cells are in or from a subject having a condition caused by a deficient amount or activity of SYNGAP1 or SCN1A protein.

6. The method of any one of claims 1 to 5, wherein the deficient amount of the target protein is caused by haploinsufficiency of the target protein, wherein the subject has a first allele encoding a functional target protein, and a second allele from which the target protein is not produced, or a second allele encoding a nonfunctional target protein, and wherein the antisense oligomer binds to a targeted portion of a RIC pre-mRNA transcribed from the first allele.

7. The method of any one of claims 1 to 5, wherein the subject has a condition caused by a disorder resulting from a deficiency in the amount or function of the target protein, wherein the subject has
(a) a first mutant allele from which
(i) the target protein is produced at a reduced level compared to production from a wild-type allele,
(ii) the target protein is produced in a form having reduced function compared to an equivalent wild-type protein, or
(iii) the target protein is not produced, and
(b) a second mutant allele from which
(i) the target protein is produced at a reduced level compared to production from a wild-type allele,
(ii) the target protein is produced in a form having reduced function compared to an equivalent wild-type protein, or
(iii) the target protein is not produced, and
wherein when the subject has a first mutant allele (a)(iii), the second mutant allele is (b)(i) or (b)(ii), and wherein when the subject has a second mutant allele (b)(iii), the first mutant allele is (a)(i) or (a)(ii), and wherein the RIC pre-mRNA is transcribed from either the first mutant allele that is (a)(i) or (a)(ii), and/or the second allele that is (b)(i) or (b)(ii).

8. The method of claim 7, wherein the target protein is produced in a form having reduced function compared to the equivalent wild-type protein.

9. The method of claim 7, wherein the target protein is produced in a form that is fully-functional compared to the equivalent wild-type protein.

10. The method of any of claims 1 to 9, wherein the targeted portion of the RIC pre-mRNA is in the retained intron within the region +6 relative to the 5′ splice site of the retained intron to −16 relative to the 3′ splice site of the retained intron.

11. The method of any of claims 1 to 9, wherein the targeted portion of the RIC pre-mRNA is in the retained intron within:
(a) the region +6 to +499 relative to the 5′ splice site of the retained intron; or
(b) the region −16 to −496 relative to the 3′ splice site of the retained intron.

12. The method of any of claims 1 to 9, wherein the targeted portion of the RIC pre-mRNA is within:
(a) the region +2e to −4e in the exon flanking the 5′ splice site of the retained intron; or
(b) the region +2e to −4e in the exon flanking the 3′ splice site of the retained intron.

13. The method of any of claims 1 to 9, wherein the targeted portion of the RIC pre-mRNA is within:
(a) the region −4e to −1,054e relative to the 5′ splice site of the retained intron;
(b) the region +6 to +499 relative to the 5′ splice site of the retained intron;
(c) the region −16 to −496 relative to the 3′ splice site of the retained intron; or
(d) the region +2e to +1,912e relative to the 3′ splice site of the retained intron.

14. The method of any one of claims 1 to 13, wherein the target protein is SCN1A.

15. The method of claim 14, wherein the RIC pre-mRNA comprises a sequence with at least about 80%, 85%, 90%, 95%, 97%, or 100% sequence identity to any one of SEQ ID NOs: 4-7.

16. The method of claim 14, wherein the RIC pre-mRNA is encoded by a genetic sequence with at least about 80%, 85%, 90%, 95%, 97%, or 100% sequence identity to SEQ ID NO: 1.

17. The method of claim 14, wherein the targeted portion of the RIC pre-mRNA comprises a sequence with at least 80%, 85%, 90%, 95%, 97%, or 100% sequence identity to a region comprising at least 8 contiguous nucleic acids of SEQ ID NO: 2593.

18. The method of claim 14, wherein the ASO comprises a sequence that is at least about 80%, 85%, 90%, 95%, 97%, or 100% complimentary to any one of SEQ ID NOs: 10-1037.

19. The method of claim 14, wherein the targeted portion of the RIC pre-mRNA is within the region −264e to +496 relative to the 5′ splice site of the retained intron 21 or within the region −496 to +37e relative to the 3′ splice site of the retained intron 21.

20. The method of claim 19, wherein the ASO comprises a sequence that is at least about 80%, 85%, 90%, 95%, 97%, or 100% complimentary to any one of SEQ ID NOs: 10-266 or 524-1037.

21. The method of claim 14, wherein the targeted portion of the RIC pre-mRNA is within the region −264e to −4e relative to the 5′ splice site of the retained intron 21.

22. The method of claim 21, wherein the ASO comprises a sequence that is at least about 80%, 85%, 90%, 95%, 97%, or 100% complimentary to any one of SEQ ID NOs: 10-62, 524-576, or 781-833.

23. The method of claim 14, wherein the targeted portion of the RIC pre-mRNA is in retained intron 21 within the region +6 to +496 relative to the 5′ splice site of the retained intron 21.

24. The method of claim 23, wherein the ASO comprises a sequence that is at least about 80%, 85%, 90%, 95%, 97%, or 100% complimentary to any one of SEQ ID NOs: 63-162, 577-675, or 834-932.

25. The method of claim 14, wherein the targeted portion of the RIC pre-mRNA is in retained intron 21 within the region −16 to −496 relative to the 3′ splice site of the retained intron 21.

26. The method of claim 25, wherein the ASO comprises a sequence that is at least about 80%, 85%, 90%, 95%, 97%, or 100% complimentary to any one of SEQ ID NOs: 163-258, 676-772, or 933-1029.

27. The method of claim 14, wherein the targeted portion of the RIC pre-mRNA is within the region +2e to +37e relative to the 3′ splice site of the retained intron 21.

28. The method of claim 27, wherein the ASO comprises a sequence that is at least about 80%, 85%, 90%, 95%, 97%, or 100% complimentary to any one of SEQ ID NOs: 259-266, 773-780, or 1030-1037.

29. The method of claim 14, wherein the targeted portion of the RIC pre-mRNA is within the region −264e to +496 relative to the 5′ splice site of the retained intron 23 or within the region −496 to +37e relative to the 3′ splice site of the retained intron 23.

30. The method of claim 29, wherein the ASO comprises a sequence that is at least about 80%, 85%, 90%, 95%, 97%, or 100% complimentary to any one of SEQ ID NOs: 267-523.

31. The method of claim 14, wherein the targeted portion of the RIC pre-mRNA is within the region −264e to −4e relative to the 5′ splice site of the retained intron 23.

32. The method of claim 31, wherein the ASO comprises a sequence that is at least about 80%, 85%, 90%, 95%, 97%, or 100% complimentary to any one of SEQ ID NOs: 267-319.

33. The method of claim 14, wherein the targeted portion of the RIC pre-mRNA is in retained intron 23 within the region +6 to +496 relative to the 5′ splice site of the retained intron 23.

34. The method of claim 33, wherein the ASO comprises a sequence that is at least about 80%, 85%, 90%, 95%, 97%, or 100% complimentary to any one of SEQ ID NOs: 320-418.

35. The method of claim 14, wherein the targeted portion of the RIC pre-mRNA is in retained intron 23 within the region −16 to −496 relative to the 3′ splice site of the retained intron 23.

36. The method of claim 35, wherein the ASO comprises a sequence that is at least about 80%, 85%, 90%, 95%, 97%, or 100% complimentary to any one of SEQ ID NOs: 419-515.

37. The method of claim 14, wherein the targeted portion of the RIC pre-mRNA is within the region +2e to +37e relative to the 3′ splice site of the retained intron 23.

38. The method of claim 37, wherein the ASO comprises a sequence that is at least about 80%, 85%, 90%, 95%, 97%, or 100% complimentary to any one of SEQ ID NOs: 516-523.

39. The method of any one of claims 1 to 13, wherein the target protein is SYNGAP1.

40. The method of claim 39, wherein the RIC pre-mRNA comprises a sequence with at least about 80%, 85%, 90%, 95%, 97%, or 100% sequence identity to any one of SEQ ID NOs: 8 or 9.

41. The method of claim 39, wherein the RIC pre-mRNA is encoded by a genetic sequence with at least about 80%, 85%, 90%, 95%, 97%, or 100% sequence identity to SEQ ID NO: 2 or 3.

42. The method of claim 39, wherein the targeted portion of the RIC pre-mRNA comprises a sequence with at least 80%, 85%, 90%, 95%, 97%, or 100% sequence identity to a region comprising at least 8 contiguous nucleic acids of SEQ ID NO: 2592, 2594, or 2595.

43. The method of claim 39, wherein the ASO comprises a sequence that is at least about 80%, 85%, 90%, 95%, 97%, or 100% complimentary to any one of SEQ ID NOs: 1038-2591.

44. The method of claim 39, wherein the targeted portion of the RIC pre-mRNA is within the region −73e to +499 relative to the 5′ splice site of the retained intron 18 or within the region −496 to +1,912e relative to the 3′ splice site of the retained intron 19.

45. The method of claim 44, wherein the ASO comprises a sequence that is at least about 80%, 85%, 90%, 95%, 97%, or 100% complimentary to any one of SEQ ID NOs: 1038-1509 or 1815-2286.

46. The method of claim 39, wherein the targeted portion of the RIC pre-mRNA is within the region −73e to −4e relative to the 5′ splice site of the retained intron 18.

47. The method of claim 44, wherein the ASO comprises a sequence that is at least about 80%, 85%, 90%, 95%, 97%, or 100% complimentary to any one of SEQ ID NOs: 1038-1050 or 1815-1827.

48. The method of claim 39, wherein the targeted portion of the RIC pre-mRNA is in retained intron 18 within the region +6 to +499 relative to the 5′ splice site of the retained intron 18.

49. The method of claim 48, wherein the ASO comprises a sequence that is at least about 80%, 85%, 90%, 95%, 97%, or 100% complimentary to any one of SEQ ID NOs: 1051-1136 or 1828-1913.

50. The method of claim 39, wherein the targeted portion of the RIC pre-mRNA is in retained intron 19 within the region −16 to −496 relative to the 3′ splice site of the retained intron 19.

51. The method of claim 50, wherein the ASO comprises a sequence that is at least about 80%, 85%, 90%, 95%, 97%, or 100% complimentary to any one of SEQ ID NOs: 1137-1228 or 1914-2005.

52. The method of claim 39, wherein the targeted portion of the RIC pre-mRNA is within the region +17e to +1,912e relative to the 3′ splice site of the retained intron 19.

53. The method of claim 52, wherein the ASO comprises a sequence that is at least about 80%, 85%, 90%, 95%, 97%, or 100% complimentary to any one of SEQ ID NOs: 1229-1509 or 2006-2286.

54. The method of claim 39, wherein the targeted portion of the RIC pre-mRNA is within the region −1,054e to +251 relative to the 5′ splice site of the retained intron 15 or within the region −256 to +157e relative to the 3′ splice site of the retained intron 15.

55. The method of claim 54, wherein the ASO comprises a sequence that is at least about 80%, 85%, 90%, 95%, 97%, or 100% complimentary to any one of SEQ ID NOs: 1510-1814 or 2287-2591.

56. The method of claim 39, wherein the targeted portion of the RIC pre-mRNA is within the region −4e to −1,054e relative to the 5′ splice site of the retained intron 15.

57. The method of claim 56, wherein the ASO comprises a sequence that is at least about 80%, 85%, 90%, 95%, 97%, or 100% complimentary to any one of SEQ ID NOs: 1510-1686 or 2287-2463.

58. The method of claim 39, wherein the targeted portion of the RIC pre-mRNA is in retained intron 15 within the region +6 to +251 relative to the 5′ splice site of the retained intron 15.

59. The method of claim 58, wherein the ASO comprises a sequence that is at least about 80%, 85%, 90%, 95%, 97%, or 100% complimentary to any one of SEQ ID NOs: 1687-1736 or 2464-2513.

60. The method of claim 39, wherein the targeted portion of the RIC pre-mRNA is in retained intron 15 within the region −16 to −256 relative to the 3′ splice site of the retained intron 15.

61. The method of claim 60, wherein the ASO comprises a sequence that is at least about 80%, 85%, 90%, 95%, 97%, or 100% complimentary to any one of SEQ ID NOs: 1737-1785 or 2514-2562.

62. The method of claim 39, wherein the targeted portion of the RIC pre-mRNA is within the region +2e to +157e relative to the 3′ splice site of the retained intron 15.

63. The method of claim 62, wherein the ASO comprises a sequence that is at least about 80%, 85%, 90%, 95%, 97%, or 100% complimentary to any one of SEQ ID NOs: 1786-1814 or 2563-2591.

64. The method of any one of claims 1 to 63, wherein the antisense oligomer does not increase the amount of the target protein or the functional RNA by modulating alternative splicing of pre-mRNA transcribed from a gene encoding the functional RNA or target protein.

65. The method of any one of claims 1 to 64, wherein the antisense oligomer does not increase the amount of the target protein or the functional RNA by modulating aberrant splicing resulting from mutation of the gene encoding the target protein or the functional RNA.

66. The method of any one of claims 1 to 65, wherein the RIC pre-mRNA was produced by partial splicing of a full-length pre-mRNA or partial splicing of a wild-type pre-mRNA.

67. The method of any one of claims 1 to 66, wherein the mRNA encoding the target protein or functional RNA is a full-length mature mRNA, or a wild-type mature mRNA.

68. The method of any one of claims 1 to 67, wherein the target protein produced is full-length protein, or wild-type protein.

69. The method of any one of claims 1 to 68, wherein the total amount of the mRNA encoding the target protein or functional RNA produced in the cell contacted with the antisense oligomer is increased about 1.1 to about 10-fold, about 1.5 to about 10-fold, about 2 to about 10-fold, about 3 to about 10-fold, about 4 to about 10-fold, about 1.1 to about 5-fold, about 1.1 to about 6-fold, about 1.1 to about 7-fold, about 1.1 to about 8-fold, about 1.1 to about 9-fold, about 2 to about 5-fold, about 2 to about 6-fold, about 2 to about 7-fold, about 2 to about 8-fold, about 2 to about 9-fold, about 3 to about 6-fold, about 3 to about 7-fold, about 3 to about 8-fold, about 3 to about 9-fold, about 4 to about 7-fold, about 4 to about 8-fold, about 4 to about 9-fold, at least about 1.1-fold, at least about 1.5-fold, at least about 2-fold, at least about 2.5-fold, at least about 3-fold, at least about 3.5-fold, at least about 4-fold, at least about 5-fold, or at least about 10-fold, compared to the total amount of the mRNA encoding the target protein or functional RNA produced in a control cell.

70. The method of one any of claims 1 to 69, wherein the total amount of target protein produced by the cell contacted with the antisense oligomer is increased about 1.1 to about 10-fold, about 1.5 to about 10-fold, about 2 to about 10-fold, about 3 to about 10-fold, about 4 to about 10-fold, about 1.1 to about 5-fold, about 1.1 to about 6-fold, about 1.1 to about 7-fold, about 1.1 to about 8-fold, about 1.1 to about 9-fold, about 2 to about 5-fold, about 2 to about 6-fold, about 2 to about 7-fold, about 2 to about 8-fold, about 2 to about 9-fold, about 3 to about 6-fold, about 3 to about 7-fold, about 3 to about 8-fold, about 3 to about 9-fold, about 4 to about 7-fold, about 4 to about 8-fold, about 4 to about 9-fold, at least about 1.1-fold, at least about 1.5-fold, at least about 2-fold, at least about 2.5-fold, at least about 3-fold, at least about 3.5-fold, at least about 4-fold, at least about 5-fold, or at least about 10-fold, compared to the total amount of target protein produced by a control cell.

71. The method of any of one claims 1 to 70, wherein the antisense oligomer comprises a backbone modification comprising a phosphorothioate linkage or a phosphorodiamidate linkage.

72. The method of any one of claims 1 to 71, wherein the antisense oligomer comprises a phosphorodiamidate morpholino, a locked nucleic acid, a peptide nucleic acid, a 2′-O-methyl, a 2′-Fluoro, or a 2′-O-methoxyethyl moiety.

73. The method of any one of claims 1 to 72, wherein the antisense oligomer comprises at least one modified sugar moiety.

74. The method of claim 73, wherein each sugar moiety is a modified sugar moiety.

75. The method of any one of claims 1 to 74, wherein the antisense oligomer consists of from 8 to 50 nucleobases, 8 to 40 nucleobases, 8 to 35 nucleobases, 8 to 30 nucleobases, 8 to 25 nucleobases, 8 to 20 nucleobases, 8 to 15 nucleobases, 9 to 50 nucleobases, 9 to 40 nucleobases, 9 to 35 nucleobases, 9 to 30 nucleobases, 9 to 25 nucleobases, 9 to 20 nucleobases, 9 to 15 nucleobases, 10 to 50 nucleobases, 10 to 40 nucleobases, 10 to 35 nucleobases, 10 to 30 nucleobases, 10 to 25 nucleobases, 10 to 20 nucleobases, 10 to 15 nucleobases, 11 to 50 nucleobases, 11 to 40 nucleobases, 11 to 35 nucleobases, 11 to 30 nucleobases, 11 to 25 nucleobases, 11 to 20 nucleobases, 11 to 15 nucleobases, 12 to 50 nucleobases, 12 to 40 nucleobases, 12 to 35 nucleobases, 12 to 30 nucleobases, 12 to 25 nucleobases, 12 to 20 nucleobases, or 12 to 15 nucleobases.

76. The method of any one of claims 1 to 75, wherein the antisense oligomer is at least 80%, at least 85%, at least 90%, at least 95%, at least 98%, at least 99%, or 100%, complementary to the targeted portion of the RIC pre-mRNA encoding the protein.

77. The method of any one of claims 1 to 76, wherein the cell comprises a population of RIC pre-mRNAs transcribed from the gene encoding the target protein or functional RNA, wherein the population of RIC pre-mRNAs comprises two or more retained introns, and wherein the antisense oligomer binds to the most abundant retained intron in the population of RIC pre-mRNAs.

78. The method of claim 77, whereby the binding of the antisense oligomer to the most abundant retained intron induces splicing out of the two or more retained introns from the population of RIC pre-mRNAs to produce mRNA encoding the target protein or functional RNA.

79. The method of any one of claims 1 to 78, wherein the cell comprises a population of RIC pre-mRNAs transcribed from the gene encoding the target protein or functional RNA, wherein the population of RIC pre-mRNAs comprises two or more retained introns, and wherein the antisense oligomer binds to the second most abundant retained intron in the population of RIC pre-mRNAs.

80. The method of claim 79, whereby the binding of the antisense oligomer to the second most abundant retained intron induces splicing out of the two or more retained introns from the population of RIC pre-mRNAs to produce mRNA encoding the target protein or functional RNA.

81. The method of any of claims 1 to 80, wherein the method further comprises assessing SYNGAP1 or SCN1A protein expression.

82. The method of any of claims 1 to 81, wherein MRD5 is treated and wherein the antisense oligomer binds to a targeted portion of a SYNGAP1 RIC pre-mRNA, wherein the targeted portion is within a sequence selected from SEQ ID NOs: 1038-2591, or wherein DS is treated and wherein the antisense oligomer binds to a targeted portion of a SCN1A RIC pre-mRNA, wherein the targeted portion is within a sequence selected from SEQ ID NOs: 10-1037.

83. The method of any of claims 1 to 82, wherein the subject is a human.

84. The method of any of claims 1 to 82, wherein the subject is a non-human animal.

85. The method of any of claims 1 to 83, wherein the subject is a fetus, an embryo, or a child.

86. The method of any of claims 1 to 85, wherein the cells are ex vivo.

87. The method of any of claims 1 to 86, wherein the antisense oligomer is administered by intrathecal injection, intracerebroventricular injection, intraperitoneal injection, intramuscular injection, subcutaneous injection, or intravenous injection of the subject.

88. The method of any of claims 1 to 87, wherein the 9 nucleotides at −3e to −1e of the exon flanking the 5′ splice site and +1 to +6 of the retained intron, are identical to the corresponding wild-type sequence.

89. The method of any of claims 1 to 88, wherein the 16 nucleotides at −15 to −1 of the retained intron and +1e of the exon flanking the 3′ splice site are identical to the corresponding wild-type sequence.

90. An antisense oligomer as used in a method of any of claims 1 to 89.

91. An antisense oligomer comprising a sequence with at least about 80%, 85%, 90%, 95%, 97%, or 100% sequence identity to any one of SEQ ID NOs: 10-2591.

92. A pharmaceutical composition comprising the antisense oligomer of claim 90 or 91 and a pharmaceutically acceptable excipient, diluent, or carrier.

93. A method of treating a subject in need thereof, by administering the pharmaceutical composition of claim 92 by intrathecal injection, intracerebroventricular injection, intraperitoneal injection, intramuscular injection, subcutaneous injection, or intravenous injection.

94. A composition comprising an antisense oligomer for use in a method of increasing expression of a target protein or a functional RNA by cells to treat MRD5 or DS in a subject in need thereof, associated with a deficient protein or deficient functional RNA, wherein the deficient protein or deficient functional RNA is deficient in amount or activity in the subject, wherein the antisense oligomer enhances constitutive splicing of a retained intron-containing pre-mRNA (RIC pre-mRNA) encoding the target protein or the functional RNA, wherein the target protein is:
(a) the deficient protein; or
(b) a compensating protein which functionally augments or replaces the deficient protein or in the subject;
and wherein the functional RNA is:
(c) the deficient RNA; or
(d) a compensating functional RNA which functionally augments or replaces the deficient functional RNA in the subject;
wherein the RIC pre-mRNA comprises a retained intron, an exon flanking the 5′ splice site and an exon flanking the 3′ splice site, and wherein the retained intron is spliced from the RIC pre-mRNA encoding the target protein or the functional RNA, thereby increasing production or activity of the target protein or the functional RNA in the subject.

95. A composition comprising an antisense oligomer for use in a method of treating a condition associated with SYNGAP1 or SCN1A protein in a subject in need thereof, the method comprising the step of increasing expression of SYNGAP1 or SCN1A protein by cells of the subject, wherein the cells have a retained-intron-containing pre-mRNA (RIC pre-mRNA) comprising a retained intron, an exon flanking the 5′ splice site of the retained intron, an exon flanking the 3′ splice site of the retained intron, and wherein the RIC pre-mRNA encodes the SYNGAP1 or SCN1A protein, the method comprising contacting the cells with the antisense oligomer, whereby the retained intron is constitutively spliced from the RIC pre-mRNA transcripts encoding SYNGAP1 or SCN1A protein, thereby increasing the level of mRNA encoding SYNGAP1 or SCN1A protein, and increasing the expression of SYNGAP1 or SCN1A protein, in the cells of the subject.

96. The composition of claim 95, wherein the condition is a disease or disorder.

97. The composition of claim 96, wherein the disease or disorder is AD mental retardation 5 or Dravet syndrome.

98. The composition of claim 97, wherein the target protein and RIC pre-mRNA are encoded by the SYNGAP1 or SCN1A gene.

99. The composition of any of claims 94 to 98, wherein the antisense oligomer targets a portion of the RIC pre-mRNA that is in the retained intron within the region +6 relative to the 5′ splice site of the retained intron to −16 relative to the 3′ splice site of the retained intron.

100. The composition of any of claims 94 to 98, wherein the antisense oligomer targets a portion of the RIC pre-mRNA that is in the retained intron within:
(a) the region +6 to +499 relative to the 5′ splice site of the retained intron; or
(b) the region −16 to −496 relative to the 3′ splice site of the retained intron.

101. The composition of any of claims 94 to 98, wherein the antisense oligomer targets a portion of the RIC pre-mRNA that is within the region about 100 nucleotides downstream of the 5′ splice site of the at least one retained intron, to about 100 nucleotides upstream of the 3′ splice site of the at least one retained intron.

102. The composition of any of claims 94 to 98, wherein the targeted portion of the RIC pre-mRNA is within:
(a) the region +2e to −4e in the exon flanking the 5′ splice site of the retained intron; or
(b) the region +2e to −4e in the exon flanking the 3′ splice site of the retained intron.

103. The composition of any of claims 94 to 98, wherein the targeted portion of the RIC pre-mRNA is within:
(a) the region −4e to −1,054e relative to the 5′ splice site of the retained intron;
(b) the region +6 to +499 relative to the 5′ splice site of the retained intron;
(c) the region −16 to −496 relative to the 3′ splice site of the retained intron; or
(d) the region +2e to +1,912e relative to the 3′ splice site of the retained intron.

104. The composition of any one of claims 94 to 98, wherein the target protein is SCN1A.

105. The composition of claim 104, wherein the RIC pre-mRNA comprises a sequence with at least about 80%, 85%, 90%, 95%, 97%, or 100% sequence identity to any one of SEQ ID NOs: 4-7.

106. The composition of claim 104, wherein the RIC pre-mRNA is encoded by a genetic sequence with at least about 80%, 85%, 90%, 95%, 97%, or 100% sequence identity to SEQ ID NO: 1.

107. The composition of claim 104, wherein the targeted portion of the RIC pre-mRNA comprises a sequence with at least 80%, 85%, 90%, 95%, 97%, or 100% sequence identity to a region comprising at least 8 contiguous nucleic acids of SEQ ID NO: 2593.

108. The composition of claim 104, wherein the ASO comprises a sequence that is at least about 80%, 85%, 90%, 95%, 97%, or 100% complimentary to any one of SEQ ID NOs: 10-1037.

109. The composition of claim 104, wherein the targeted portion of the RIC pre-mRNA is within the region −264e to +496 relative to the 5′ splice site of the retained intron 21 or within the region −496 to +37e relative to the 3′ splice site of the retained intron 21.

110. The composition of claim 109, wherein the ASO comprises a sequence that is at least about 80%, 85%, 90%, 95%, 97%, or 100% complimentary to any one of SEQ ID NOs: 10-266 or 524-1037.

111. The composition of claim 104, wherein the targeted portion of the RIC pre-mRNA is within the region −264e to −4e relative to the 5′ splice site of the retained intron 21.

112. The composition of claim 111, wherein the ASO comprises a sequence that is at least about 80%, 85%, 90%, 95%, 97%, or 100% complimentary to any one of SEQ ID NOs: 10-62, 524-576, or 781-833.

113. The composition of claim 104, wherein the targeted portion of the RIC pre-mRNA is in retained intron 21 within the region +6 to +496 relative to the 5′ splice site of the retained intron 21.

114. The composition of claim 113, wherein the ASO comprises a sequence that is at least about 80%, 85%, 90%, 95%, 97%, or 100% complimentary to any one of SEQ ID NOs: 63-162, 577-675, or 834-932.

115. The composition of claim 104, wherein the targeted portion of the RIC pre-mRNA is in retained intron 21 within the region −16 to −496 relative to the 3′ splice site of the retained intron 21.

116. The composition of claim 115, wherein the ASO comprises a sequence that is at least about 80%, 85%, 90%, 95%, 97%, or 100% complimentary to any one of SEQ ID NOs: 163-258, 676-772, or 933-1029.

117. The composition of claim 104, wherein the targeted portion of the RIC pre-mRNA is within the region +2e to +37e relative to the 3′ splice site of the retained intron 21.

118. The composition of claim 117, wherein the ASO comprises a sequence that is at least about 80%, 85%, 90%, 95%, 97%, or 100% complimentary to any one of SEQ ID NOs: 259-266, 773-780, or 1030-1037.

119. The composition of claim 104, wherein the targeted portion of the RIC pre-mRNA is within the region −264e to +496 relative to the 5′ splice site of the retained intron 23 or within the region −496 to +37e relative to the 3′ splice site of the retained intron 23.

120. The composition of claim 119, wherein the ASO comprises a sequence that is at least about 80%, 85%, 90%, 95%, 97%, or 100% complimentary to any one of SEQ ID NOs: 267-523.

121. The composition of claim 104, wherein the targeted portion of the RIC pre-mRNA is within the region −264e to −4e relative to the 5′ splice site of the retained intron 23.

122. The composition of claim 121, wherein the ASO comprises a sequence that is at least about 80%, 85%, 90%, 95%, 97%, or 100% complimentary to any one of SEQ ID NOs: 267-319.

123. The composition of claim 104, wherein the targeted portion of the RIC pre-mRNA is in retained intron 23 within the region +6 to +496 relative to the 5′ splice site of the retained intron 23.

124. The composition of claim 123, wherein the ASO comprises a sequence that is at least about 80%, 85%, 90%, 95%, 97%, or 100% complimentary to any one of SEQ ID NOs: 320-418.

125. The composition of claim 104, wherein the targeted portion of the RIC pre-mRNA is in retained intron 23 within the region −16 to −496 relative to the 3′ splice site of the retained intron 23.

126. The composition of claim 125, wherein the ASO comprises a sequence that is at least about 80%, 85%, 90%, 95%, 97%, or 100% complimentary to any one of SEQ ID NOs: 419-515.

127. The composition of claim 104, wherein the targeted portion of the RIC pre-mRNA is within the region +2e to +37e relative to the 3′ splice site of the retained intron 23.

128. The composition of claim 127, wherein the ASO comprises a sequence that is at least about 80%, 85%, 90%, 95%, 97%, or 100% complimentary to any one of SEQ ID NOs: 516-523.

129. The composition of any one of claims 94 to 98, wherein the target protein is SYNGAP1.

130. The composition of claim 129, wherein the RIC pre-mRNA comprises a sequence with at least about 80%, 85%, 90%, 95%, 97%, or 100% sequence identity to any one of SEQ ID NOs: 8 or 9.

131. The composition of claim 129, wherein the RIC pre-mRNA is encoded by a genetic sequence with at least about 80%, 85%, 90%, 95%, 97%, or 100% sequence identity to SEQ ID NO: 2 or 3.

132. The composition of claim 129, wherein the targeted portion of the RIC pre-mRNA comprises a sequence with at least 80%, 85%, 90%, 95%, 97%, or 100% sequence identity to a region comprising at least 8 contiguous nucleic acids of SEQ ID NO: 2592, 2594, or 2595.

133. The composition of claim 129, wherein the ASO comprises a sequence that is at least about 80%, 85%, 90%, 95%, 97%, or 100% complimentary to any one of SEQ ID NOs: 1038-2591.

134. The composition of claim 129, wherein the targeted portion of the RIC pre-mRNA is within the region −73e to +499 relative to the 5′ splice site of the retained intron 18 or within the region −496 to +1,912e relative to the 3′ splice site of the retained intron 19.

135. The composition of claim 134, wherein the ASO comprises a sequence that is at least about 80%, 85%, 90%, 95%, 97%, or 100% complimentary to any one of SEQ ID NOs: 1038-1509 or 1815-2286.

136. The composition of claim 129, wherein the targeted portion of the RIC pre-mRNA is within the region −73e to −4e relative to the 5′ splice site of the retained intron 18.

137. The composition of claim 136, wherein the ASO comprises a sequence that is at least about 80%, 85%, 90%, 95%, 97%, or 100% complimentary to any one of SEQ ID NOs: 1038-1050 or 1815-1827.

138. The composition of claim 129, wherein the targeted portion of the RIC pre-mRNA is in retained intron 18 within the region +6 to +499 relative to the 5′ splice site of the retained intron 18.

139. The composition of claim 138, wherein the ASO comprises a sequence that is at least about 80%, 85%, 90%, 95%, 97%, or 100% complimentary to any one of SEQ ID NOs: 1051-1136 or 1828-1913.

140. The composition of claim 129, wherein the targeted portion of the RIC pre-mRNA is in retained intron 19 within the region −16 to −496 relative to the 3′ splice site of the retained intron 19.

141. The composition of claim 140, wherein the ASO comprises a sequence that is at least about 80%, 85%, 90%, 95%, 97%, or 100% complimentary to any one of SEQ ID NOs: 1137-1228 or 1914-2005.

142. The composition of claim 129, wherein the targeted portion of the RIC pre-mRNA is within the region +17e to +1,912e relative to the 3′ splice site of the retained intron 19.

143. The composition of claim 142, wherein the ASO comprises a sequence that is at least about 80%, 85%, 90%, 95%, 97%, or 100% complimentary to any one of SEQ ID NOs: 1229-1509 or 2006-2286.

144. The composition of claim 129, wherein the targeted portion of the RIC pre-mRNA is within the region −1,054e to +251 relative to the 5′ splice site of the retained intron 15 or within the region −256 to +157e relative to the 3′ splice site of the retained intron 15.

145. The composition of claim 144, wherein the ASO comprises a sequence that is at least about 80%, 85%, 90%, 95%, 97%, or 100% complimentary to any one of SEQ ID NOs: 1510-1814 or 2287-2591.

146. The composition of claim 129, wherein the targeted portion of the RIC pre-mRNA is within the region −4e to −1,054e relative to the 5′ splice site of the retained intron 15.

147. The composition of claim 146, wherein the ASO comprises a sequence that is at least about 80%, 85%, 90%, 95%, 97%, or 100% complimentary to any one of SEQ ID NOs: 1510-1686 or 2287-2463.

148. The composition of claim 129, wherein the targeted portion of the RIC pre-mRNA is in retained intron 15 within the region +6 to +251 relative to the 5′ splice site of the retained intron 15.

149. The composition of claim 148, wherein the ASO comprises a sequence that is at least about 80%, 85%, 90%, 95%, 97%, or 100% complimentary to any one of SEQ ID NOs: 1687-1736 or 2464-2513.

150. The composition of claim 129, wherein the targeted portion of the RIC pre-mRNA is in retained intron 15 within the region −16 to −256 relative to the 3′ splice site of the retained intron 15.

151. The composition of claim 150, wherein the ASO comprises a sequence that is at least about 80%, 85%, 90%, 95%, 97%, or 100% complimentary to any one of SEQ ID NOs: 1737-1785 or 2514-2562.

152. The composition of claim 129, wherein the targeted portion of the RIC pre-mRNA is within the region +2e to +157e relative to the 3′ splice site of the retained intron 15.

153. The composition of claim 152, wherein the ASO comprises a sequence that is at least about 80%, 85%, 90%, 95%, 97%, or 100% complimentary to any one of SEQ ID NOs: 1786-1814 or 2563-2591.

154. The composition of any one of claims 94 to 153 wherein the antisense oligomer does not increase the amount of target protein or functional RNA by modulating alternative splicing of the pre-mRNA transcribed from a gene encoding the target protein or functional RNA.

155. The composition of any one of claims 94 to 154, wherein the antisense oligomer does not increase the amount of the functional RNA or functional protein by modulating aberrant splicing resulting from mutation of the gene encoding the target protein or functional RNA.

156. The composition of any one of claims 94 to 155, wherein the RIC pre-mRNA was produced by partial splicing from a full-length pre-mRNA or a wild-type pre-mRNA.

157. The composition of any one of claims 94 to 156, wherein the mRNA encoding the target protein or functional RNA is a full-length mature mRNA, or a wild-type mature mRNA.

158. The composition of any one of claims 94 to 157, wherein the target protein produced is full-length protein, or wild-type protein.

159. The composition of any one of claims 94 to 158, wherein the retained intron is a rate-limiting intron.

160. The composition of any one of claims 94 to 159 wherein said retained intron is the most abundant retained intron in said RIC pre-mRNA.

161. The composition of any one of claims 94 to 159, wherein the retained intron is the second most abundant retained intron in said RIC pre-mRNA.

162. The composition of any one of claims 94 to 161, wherein the antisense oligomer comprises a backbone modification comprising a phosphorothioate linkage or a phosphorodiamidate linkage.

163. The composition of any of claims 94 to 162 wherein said antisense oligomer is an antisense oligonucleotide.

164. The composition of any of claims 94 to 163, wherein the antisense oligomer comprises a phosphorodiamidate morpholino, a locked nucleic acid, a peptide nucleic acid, a 2′-O-methyl, a 2′-Fluoro, or a 2′-O-methoxyethyl moiety.

165. The composition of any of claims 94 to 164, wherein the antisense oligomer comprises at least one modified sugar moiety.

166. The composition of claim 165, wherein each sugar moiety is a modified sugar moiety.

167. The composition of any of claims 94 to 166, wherein the antisense oligomer consists of from 8 to 50 nucleobases, 8 to 40 nucleobases, 8 to 35 nucleobases, 8 to 30 nucleobases, 8 to 25 nucleobases, 8 to 20 nucleobases, 8 to 15 nucleobases, 9 to 50 nucleobases, 9 to 40 nucleobases, 9 to 35 nucleobases, 9 to 30 nucleobases, 9 to 25 nucleobases, 9 to 20 nucleobases, 9 to 15 nucleobases, 10 to 50 nucleobases, 10 to 40 nucleobases, 10 to 35 nucleobases, 10 to 30 nucleobases, 10 to 25 nucleobases, 10 to 20 nucleobases, 10 to 15 nucleobases, 11 to 50 nucleobases, 11 to 40 nucleobases, 11 to 35 nucleobases, 11 to 30 nucleobases, 11 to 25 nucleobases, 11 to 20 nucleobases, 11 to 15 nucleobases, 12 to 50 nucleobases, 12 to 40 nucleobases, 12 to 35 nucleobases, 12 to 30 nucleobases, 12 to 25 nucleobases, 12 to 20 nucleobases, or 12 to 15 nucleobases.

168. A pharmaceutical composition comprising the antisense oligomer of any of the compositions of claims 94 to 167, and a pharmaceutically acceptable excipient, diluent, or carrier.

169. A method of treating a subject in need thereof, by administering the pharmaceutical composition of claim 168 by intrathecal injection, intracerebroventricular injection, intraperitoneal injection, intramuscular injection, subcutaneous injection, or intravenous injection.

170. A pharmaceutical composition comprising: an antisense oligomer that hybridizes to a target sequence of a SCN1A or SYNGAP1 mRNA transcript, wherein the SCN1A or SYNGAP1 mRNA transcript comprises a retained intron, wherein the antisense oligomer induces splicing out of the retained intron from the SCN1A or SYNGAP1 mRNA transcript; and a pharmaceutically acceptable excipient, diluent, or carrier.

171. The pharmaceutical composition of claim 170, wherein the SCN1A or SYNGAP1 mRNA transcript is a SCN1A or SYNGAP1 RIC pre-mRNA transcript.

172. The pharmaceutical composition of claim 170 or 171, wherein the targeted portion of the SCN1A or SYNGAP1 RIC pre-mRNA transcript is in the retained intron within the region +500 relative to the 5′ splice site of the retained intron to −500 relative to the 3′ spliced site of the retained intron.

173. The pharmaceutical composition of claim 170 or 171, wherein the SCN1A or SYNGAP1 RIC pre-mRNA transcript is encoded by a genetic sequence with at least about 80%, 85%, 90%, 95%, 96%, 97%, 98%, 99% or 100% sequence identity to any one of SEQ ID NOs: 1-3.

174. The pharmaceutical composition of claim 170 or 171, wherein the SCN1A or SYNGAP1 RIC pre-mRNA transcript comprises a sequence with at least about 80%, 85%, 90%, 95%, 96%, 97%, 98%, 99% or 100% sequence identity to any one of SEQ ID NOs: 4-9.

175. The pharmaceutical composition of claim 170, wherein the antisense oligomer comprises a backbone modification comprising a phosphorothioate linkage or a phosphorodiamidate linkage.

176. The pharmaceutical composition of claim 170, wherein the antisense oligomer is an antisense oligonucleotide.

177. The pharmaceutical composition of claim 170, wherein the antisense oligomer comprises a phosphorodiamidate morpholino, a locked nucleic acid, a peptide nucleic acid, a 2′-O-methyl, a 2′-Fluoro, or a 2′-O-methoxyethyl moiety.

178. The pharmaceutical composition of claim 170, wherein the antisense oligomer comprises at least one modified sugar moiety.

179. The pharmaceutical composition of claim 170, wherein the antisense oligomer comprises from 8 to 50 nucleobases, 8 to 40 nucleobases, 8 to 35 nucleobases, 8 to 30 nucleobases, 8 to 25 nucleobases, 8 to 20 nucleobases, 8 to 15 nucleobases, 9 to 50 nucleobases, 9 to 40 nucleobases, 9 to 35 nucleobases, 9 to 30 nucleobases, 9 to 25 nucleobases, 9 to 20 nucleobases, 9 to 15 nucleobases, 10 to 50 nucleobases, 10 to 40 nucleobases, 10 to 35 nucleobases, 10 to 30 nucleobases, 10 to 25 nucleobases, 10 to 20 nucleobases, 10 to 15 nucleobases, 11 to 50 nucleobases, 11 to 40 nucleobases, 11 to 35 nucleobases, 11 to 30 nucleobases, 11 to 25 nucleobases, 11 to 20 nucleobases, 11 to 15 nucleobases, 12 to 50 nucleobases, 12 to 40 nucleobases, 12 to 35 nucleobases, 12 to 30 nucleobases, 12 to 25 nucleobases, 12 to 20 nucleobases, or 12 to 15 nucleobases.

180. The pharmaceutical composition of claim 170 or 171, wherein the antisense oligomer is at least 80%, at least 85%, at least 90%, at least 95%, at least 98%, at least 99%, or is 100% complementary to a targeted portion of the SCN1A or SYNGAP1 RIC pre-mRNA transcript.

181. The pharmaceutical composition of claim 170 or 171 wherein the targeted portion of the SCN1A or SYNGAP1 RIC pre-mRNA transcript is within a sequence selected from SEQ ID NOs: 2592-2595.

182. The pharmaceutical composition of claim 170, wherein the antisense oligomer comprises a nucleotide sequence that is at least about 80%, 85%, 90%, 91%, 92%, 93%, 94%, 95%, 96%, 97%, 98%, or 99% sequence identity to any one of SEQ ID NOs: 10-2591.

183. The pharmaceutical composition of claim 170, wherein the antisense oligomer comprises a nucleotide sequence selected from SEQ ID NOs: 10-2591.

184. The pharmaceutical composition of any one of the claims 170-183, wherein the pharmaceutical composition is formulated for intrathecal injection, intracerebroventricular injection, intraperitoneal injection, intramuscular injection, subcutaneous injection, or intravenous injection.

185. A method of inducing processing of a deficient SCN1A or SYNGAP1 mRNA transcript to facilitate removal of a retained intron to produce a fully processed SCN1A or SYNGAP1 mRNA transcript that encodes a functional form of a SCN1A or SYNGAP1 protein, the method comprising:
(a) contacting an antisense oligomer to a target cell of a subject;
(b) hybridizing the antisense oligomer to the deficient SCN1A or SYNGAP1 mRNA transcript, wherein the deficient SCN1A or SYNGAP1 mRNA transcript is capable of encoding the functional form of a SCN1A or SYNGAP1 protein and comprises at least one retained intron;
(c) removing the at least one retained intron from the deficient SCN1A or SYNGAP1 mRNA transcript to produce the fully processed SCN1A or SYNGAP1 mRNA transcript that encodes the functional form of SCN1A or SYNGAP1 protein; and
(d) translating the functional form of SCN1A or SYNGAP1 protein from the fully processed SCN1A or SYNGAP1 mRNA transcript.

186. The method of claim 185, wherein the retained intron is an entire retained intron.

187. The method of claim 185, wherein the deficient SCN1A or SYNGAP1 mRNA transcript is a SCN1A or SYNGAP1 pre-mRNA transcript.

188. A method of treating a subject having a condition caused by a deficient amount or activity of SCN1A or SYNGAP1 protein comprising administering to the subject an antisense oligomer comprising a nucleotide sequence with at least about 80%, 85%, 90%, 91%, 92%, 93%, 94%, 95%, 96%, 97%, 98%, or 99% sequence identity to any one of SEQ ID NOs: 10-2591.
